United States Patent Application Publication US 2026/0275333 A1 - sequence listing, part 3

SEQ ID NO: 3045 - RNA, 64444167 nt, Homo sapiens (residues 4,296,279-6,444,417 of 64,444,167)
  source 1..64444167: mol_type = mRNA
actggtatcctgctaagaagaagtgcttagggcacagacacacaaagggaagaccatgtgaagatacagggagaaggcggccatctacaagccaaagaaagaggccccagaagaaatgcaatctaccaaaagttcagagctttggtctccagaactgtggggaaataaatttctgttgtttaagccaccccgtctatggtgctttgttatggcagcctgaacaaacaaatataatatgcagcaatatggatgaatctcgtagacactatgtagagtgaaaagaatcccagcactttgggaggttgaggcaggtggatcacctgaggtcaggggttcaagaccatcctggccaacatggtgaaaacccgtctctactaaaaatacgaaaattagcttggtgtggtggtgcacacctataatcacagctacttgggaggctgagggaggagaatcactggaacccgggaggcggaggttgcagtaagcagagatcatgccactgcactccaacctggatgatagagtgagactccatctcaaaacaaaaacaaacaaacaaacaaacaaacacaaaccaaaaacacacacacacatactgcaggattccatttatatgacatttaagagctggcaaagctaatttcgttagccttgggggatgagtattgactgggaaggggcacaggggagccttctggggtactggaaatgttttatgtcttgatttgggtgggaattatatggttatgcacctatgtaaaaatgcatcaagctgcacacacaaaattcttgagatttttgcattttattgtttgtaagatatacctaatgaaagtgtaacaaaaaattcttgagaagagacgtaagcattttggggtcagcgtcacctctgtgcgcctcattccatcgcctttacaagcaagacgatgggaatcgaggccaagtgagcactgtccaagtcagctccttttgaatctgagacaaaaataaccacgtctcaagtatgttctctcctctttttccaattgggaaaggcacagacttttttcacattcccagccagagggaatctttctcaaactttccatagagattctcctttgggcagacaccaaacatggacattttccaccagggaaaacatgctgctgagttccaggcttctagaaagaggggggtgggaaggaagtgatggcagtcaccctcccccactggcttctccccagttgccagagtggctgtgcgttgtcaccaaggggcgctgatcaaagggactgtgacaatgattctacaatacaagggtgggagaaagggctgagtcagagagggactgggctccagcctcctctgatcacgaggcttttcccgccttgtgggaaacaaaggtttagatttccccatcccctacacaaacggaaggaagtcacagatgttaaaaaaatagagtgtagtgtaatatgtaaaatgcggacagcggagggagcaccccagtcctgttcggatctatccgtctgtcccatgtggagaggagcctggtttcctggctgtatctgcctcacttccctctcctgactttttctccttgttcagttttttcagttttcttccttgctgccttcaggactcaggggtcggggcagatctttaggaatcacctatattgagcaggcattgtgacaactttgccaggaaggtgttcattttcaggtgaggacaccacggttcgggaagggaagtgactggcctaagattgcacatctgaaaggtgccagagccaggatttgaatctgagatgtttggacccagtgcttggactgggtctgttggttcagctgcctctgtctccttttcttgagaaggatattgctcaactgttgtattctatcttgtctctcaagataaataatattttaatagaatattttaaaaaatcaaaatcaatacagaaattcataagtaaaatattaaaaatttaagacaggatcagcatagtaattttttccttctgcctcaggctctaacatggcactgctctatcgacttattcttgggatccttacctccatgcatcttcccccaatgtatggtggtgctcccaaagcccactgtaggccagctgctctcctccgcccacccttttgtccttagaactctcacatggataatatttcatgctctcaatttttatcaatttgtgggtgactacaaattccacatgcccagctctggacgtaccacttgtgtcctggagttctgaggggctggagcccagcccctctctgactcagtcctctctcccacccttgtcttgcagaatcattgtcacagtccctttgatcagtgccctcttggtgacaatgcacagccactctggtgtgactccccaggacttgggtgactaccatcatttccttcccaaccctctcttttcagaagtcttgtattttcactgacctgttggaactctccccttgagcactgctgacctcccaaagtcaatttttctctcaactgaactccctgctctgtctttgggtctccttttgactgtgcacctgtctttgtcagcagcagccttctggtcacctggctcctccctcatctttattttctctatccagtctgctaccaagccttattggtgtttattctcaaatatctcccacagattcgctttctcctccaataatccagacacaccataccttcgactgtccacttccagagagagaacatagacacaatggtttgtctgaagaccgcaggtgtagttgagctcatggggaggaaggaatgggtttgtttagagctgtgtagttggggcaaatgggattcagaggcagaactgagatccaagctattgacatgtcttctcactcaatcttttattctgtaagtagatattgtaaacctaccatattctaggcactttctgggtgctagggagacaaagattgaaaataagttttcgtgcttgagaagctcacagcctggtgggagaaacatacccacaaatagcccctccaggagcatgccattttggagcaaccaaccttgcctgaaaagatgggctgggaaagttccccagtagagttgacattgagccaaacttcaatgttgagtggaatgagggagatgactgatgtctttggtgatgatgatgatgatgatgatgatgatgatcatgatggtcattatgaagagaaagaagatggtaaaactcacaggggtggtaatgatgaacagggagaccaccattatcaggatgtggtggtgggctgagggaggtccctcaccttggtgactctgttggttatagagaccaggcagtgatatcagtcatcctgaactagtccatagggcttcattgcctgatttccggtcctcttttaaagtcatggcttaggagtcaaaatatagcttatctctgcccttttcttctgaataaagaagcacgcagaatgcaggcattcatttggctcttgcaagcagaatatgaagataattttttctggctgtgcacttagaggcacttgccttctctgtgtttataaagagagattcttgcaactggccttgacttgattttaatctcaataaaaattcactaagaactgaggaaagggaattttcacactaattaccagttaatcagctggcacagatgttgaacatctggtactcatcctgcctcctcctattgtagagttgtctgattcagcagctagagcctgatgggcttgagtcccaggggagcatctgtgctgtgtccagagagtttgtagatttaaatgggagctgtgcttcctatactcttcgagttctagaaccactgggtctgctaactgataactccggaggggtctcttcactcccaaatatctcttccattggcctgtcacatgcttgaagtcttgccattaacaccttctttccttgatttagatcttgtatcctcaagcaaggatagaagaacatataaagacattattactccctaacatcccaatgtaacagaatttacaacttactgcctcttgagccactgtattttaatggtggggatgagggaggagctgcttaaagtctgggccaattcccaatgagctgggttggatgaggatgtgtagcagaagagttggcagctttggggcctcccaggcttgagggtaggatcttcaggtgatggaaggtgggagaaatgccccaaaggtggcccagaaccttggtcaagccagagctgggagtgaaaaaaggggtccaaatttgcttgaaggcaccagcagggaccctgtggccatgcttggactccctgcccctcacttgtgccctgctgccactctctgcagctaactccttagcaggtggggcttaattccaagatacaatttgcggcagatgtggccgctcagggcagccagcatggcaggtgagtaaggcccttcttccttgctccctgtatggtctccaaccagtcctgggtttgctgaggctcttccagctccctgtctcccatccccagcccttctgcccccagatgctgccagtgtggagacaccacagtgatttgcatccaggagactgatgttccaaaacagcttagaggaaacccaggtatttctttgattttaacaatttttagaaaagttttctcaaggctcactttcctgccaccacaagggaagcctaacttggtttttcttcaatagtcaaacatgctcttttgctgcacctctatttgcaatgcatcatcttgttcccctttccagtgataagatgccaggccttggagacttcagcaaatggaaaattccagggcctcagtttctgggcagacgccacctgactgagccagctgtcctgttcagagggtggcatccatgttggagcctcataaccacatgcagccaattcaggagacacatgcaagctaaattcaggagattctgggtactccttgaataaccctgagttaccttctaaaaacatgaagtggaaattggaaagcatatctcaagcattatgactgtaagactgagtctcctaaggcactaggcatgcctgtcatgggtttgctcacagatccatttcttgtccttttctctccacagagatccacatttcccagactcctttgtgttggaacccactttgggcacaaagattacagtatgtaggaatctataccctgggggcagctcttaactaatgactgacaagtgtcagggtataaataccccagcttccctgtccctaatcaggatgaatctgggatgagacctcctgcagtactgattcaaagttacccttcctggccctttggttgatctcacacccttgcctggccttctttccttcctactcccctacatttccccactctgggaacattgctaataaatgacattcacaggaatccccatctcaagggggataaggctctgctttattctttttttctgacttcctctagttggaatcagctgggcttatactgttgttttgggtcatgtctgtgagccttgctgtcccaatttcagtgtaagtccctagagggtaaaaaagacagcttacactctattttctccctctgagatgtccagaggtgctgggacatccctagaatcactccttgccagaggtggggggctttggaagtcattgagaccaatgccctcatttctaccaggtgaagaaactgtgacccagaaaagagaaggggcttgtggctgattgttactctttttctcctgactgagatgtgcaaggtgacactgtgtgttcatggtagtttgttcttggtttattgagacatttttattattactcttgctatgtggtgtctggaggcatcccaggcctttggcagatatggctgggaacctccccgaagcctttgtgagagagttactctgtgtcctatgtgtcaggcaggctctgctccagggttagggacacagggttggttggggaggtgaggggtaggcagctaagtaaaggggaatcacagtagggtttggtttggggcacatgtgtggctcccagtggggtccctgagcattttagcccagcctggggtccaggagggggacagagaatgcttccatgatgaattgaaatctgagctgagtgtggaaggtgagtaggtgttcttaaggtaggaaagtagaaaaaggcaactctctccaaattcaggatacaaccatcctctgacataaaaatgatactttaaaaattttttttagaaaggcagtgtgcataggaatatgagaacagaatttggggtctatgggatttaaatcctggctccatcaattactttcttggtgacctcatgcaaattccttaaactctttcaacctcagaatcctcatctttcagttgggataaatcctgtcccattggggaggcacacagatcaaatcagaataataaactcctgatctgtacaaaactcttcagaaataatagctatgatgttcccacatgtattgactttttaactttcagaacatggtattacccttatcatcatcaaatcaatcttgattgttttcctaatatacaagtgcgaatgtcacattaaggaatttgaacctcatcttgtctcgtgcaccttcatttgagagcacaggcgatattatacgctgaactagaagctttgagaagagaggggacctgagcactcttgtcttaggctcctaaagaagcagttactgaggccagggtgtgagtgcgagtactttacttaagaggtgattccaggacacactggctggggagtgggaaagtgaggcagggaaaggaattcagtctacaaaggacatgtcagtccaactcctatgtgggcaacacgggctcagtgtgatggggacaccctgggacacggtgtggagcacatgcctcaaagctatcccatctgaacaaagagggagctgcatatttatccaccgattcttagcagtcattagttgagagtagatcccagggcatatggcacttgtaacgtatattgcaggcagcaaagcagattctggtggccagagaggtgggtgctggcaactggcagctagcaatggggatgttggaatggcaagataagagtgtggacaggcaccgtcagcctctgtttcaaaggtgttgcagcgggtcagaccaggatgacctgtcttccaggccttctctcgcaagaacatcatgtgtggattcatggggagacggtggtaaatgttgattgcctgtggggcacagtggagcatggctgcagatagtgtgagaactgctcaggttgcagaaaccgtgatgggtgccaggacggaggatcagagtctgagcatagacaaaaaagaggcaggtgctacatctctgtctggcaatttttgctctgcctcaattaacactggtttggtgcccaggacaagttctactttaagacactcttcccttaacacagtgatttatgaatggatttgagttgtttttaccagtgttgctgcatcaaagaaaagagaaaacattcgactccctctcttagtgttctgtcttcagcccccatcaacctgctctaataaccctccaactagcctccctggatccagaagagaggttattgaatatttctgctcccaggcagttctcatatttggacttcatgcacatgttatctttgtatagcacactacgtagttacttgacgcagagaacagtttagatccaaggagtttccttgggaggtaagcccaggagtccctgtaaggagtggggaggtggtacagggaagggaggcaaaactggtgaagatggcattaatgggcagctgggcaaccagggctcagtcctgctggggccctcggagtgaatgtatggatcaggccttaggactacccctggaggggtgaggaagctggggcatttccaccagctcctgccctctctgggtgggagctgctaccgaggagttaatttctggcacttccagcctgccctgtgctgggggaggtccctcatggtcagatattggcctcaggtagagatgcagaggtggggtgagggaaccaactgtgagtgctcactgggggaaagaaggagatgccttgctaggaataaaagggcattggaagatattttatttcctcctggcaggggcaaaatcacaatctctttcatcatgccactctcctgctcaacaagcttcattggctccccatcacttatttcatcagatctaacttcctgaatccctgccattccatcactgcctgatacttctttaccctctaatctgtaaataattacaactataacagaatgcataattaatcaaaccaacacccaagctttcagcactgtgtggagtgggagctaatgacatttggctgtggaataaattgttttagacttgtcttgccagccctacattcagctagctgtacgctggctcggcctgctcaacccactccttggcattgctcacccctcactcttgcagagtgcgcctctgttccactgttttcctgcagcttgtccaattcctgcaaattactcaaggcccagttgtggttgcacctccactggatttccttcccgtccttggtctcttatagccaatgtctgtaagggccgcttgttaggccaggcactgttggtcatccaatagagtctcactcttgctgcatgtgtgagctttgtctatccttcatgggagcaaattgctccagactggggccggagtcttattcctgtccccatggcacagccctttataggggccgagtccttgatcagtcctcagtgcataatgggtgttggtgatattgatcatgaggactgtagcagatgctgtgagtgctctgcccacatctctgcagcattcatctctgcacccaaagctgattacaatgaacgattgtgattctctgcctgggggccccttttctggctggggagctggtatgccctgtgtgcagagcaatcaagtgctgagacctactgagaaggaaacagacctgacagtgaaggatgagcttcctcaccctcgggcgaggcaactccgaagtgtactctgcgagggttaagctccagctgcctgcagtggtaacttgcttgataacccacctctttgttggcctccttctctttccttttcaatttccaatactctcatgatgttttctgctatcattatcctctagcccccagttaaaattgcactcaagtctttgttttggtgtatgaatctggatgaccctgacatgagagccagtgggcttagggttccagagcacggtgagatggttcgggctcacagtgcccataacgagggctgggagccagtgaatgtagagggccaagtgcacctgaggtcctggacttggaggtaggcctgaggccaagggaagggacaagtgggcctggagagctctttggctaaagaggagagcgactgaaatgaacttggagagaccctgaaactagttaggcactgaccattgccaaaagatgtgccttgatttgaaagtttactacaaagtggtttggctattgggaaaaagtaccactgccaccagccaaaacccacatctgcatacttctgtcctgctgcagtacttgatctgcttcccagtgagagaaattagattgttggttatgaaccaaatctttccccatcccttggggccatggatggaactctgacagcatcttagactgacctcctggtctcaggggcacctcactctggtcatagacttattttaccactctggccattagattaacctattcgtctaatgtcaaatgttccagaaacagatgccattgcctcaaggagaccagcaatgagaaagtgggtccctaggagcagcctacccatagctggagccctgagggccatgatcccccaaatcttgtgtagggcagggggtctcctaaagcctgattctgtaaactgaccttgcgatgagtatcaagtgcccataatgactatgtgaatttcatttcttaagcatccatctgttcatcctgaatctggaacacttttacccattgaaggaattaaacaggagttggaaagagttcagtaagacaggccaaagactcaaagaacatttggcccaaggtactcccagaagagaaagagctggtgaaaatggaggctgggttcttggcagccacctcccaactagagcagggaagacagaaggagatgctagagaaatgatctaggtccaactgggaagctgccttcacgcactagtaagaatgagagaccatgcaactccaatctctaatagactgaaatatggaagcaattaagctttgcttgggactggctaaaggggaatctgaaggtgtgctgaggaattcattggttaaaacccttcttgttgggccttggtttagtagttgcagttcttgcattactgtgatgtatgattttttttattaaattttctttgttgttggccttacctatgttgttactgtggagttaactccaagctccgaggctctggggtgggcacatattcccagactttcaaatcagcttatttcatctccatggcccctaccaggcataggtgagtattttaggctggttcaatgagacatttgttgaagctttcgggaaagcagagctctttcttctgggattgctgaagatgaagacgatgtaaggctgaaattgcattggtggccttgttgccattgatccgtgaagacatgaaaagctgctcagacataaggcaaacaccaaggaaagtggaggggggatgcatggtatagggcaagagagaagaagaagaggaagaggaaaaggaagaggaagaggaggaggagaaggagaaggaaaaggaaaaaaacagagaataataattgatgcaaccttccttttagttattctgtagggccagcattttctttatcacttaaaaacaagaggggaagaaaattcgtttagcagttgctcttgatgccctgatacaccattcccttggtacactattccctcactcctacaagcacctgtgactctgtttgaggacgttctttgaattttcttggcccatgtacaggccaagctggagttcctggacttaagagtctagggagtatcccagaactaatgacaggtgagaatccatgtgtacatgctctagcttcctctccctcctatgggacaactgcccccagaactcagcttccaattgtctgaagcggcaccgtgctcacgcatgcccctgtactgtctccctttcccacacccttcctgtgctttctgagatcatctcccaaataaactacttgcatgttaattcttgtctcaggatctgcttctaggaaacttcaaactaatgagaaactcctaatgaaggaactggactacaaactaaaatttccacaaacgttataaaatccaagttaatctaatccaatcaggttcaggtggagggctctgtatggagattgtataagtccttgagggtctaaaaaagtataaagccttctctgtcctcaagaggcctaccagtttggtgaggagacagtgttaggccattcttgcattactataaagaaatacctgagtctgggtaatttgtaaagaaatgaatgaaattcacatagtcattacgagtgctgggtaatttataatttataaagaaaaagatttcattagttcatgattctgcaggctgtacaggaagcatggcgccaacacctgctctgcttctgggaagacctcaaggagcttttactcatggcagaaggtgaagcaggagcaagcatctcacatggtgaaagcaggagcaagagagaggagggaggtgctactcacttttaaacagcgagatattgcatgaactcactcacgatggtgaggacagcaccaaggggatggcactaaactgttcatgagaactccgcctccatgatccaatcacctcccaccaggccccacctccaacattggggattacatttcaacatgagattttggggggccaatatccaaactgcatcagagagctagataaaatatgagagtaaatatatcttagaactctgatgttggcaggcaggggccctgctctggggatatctggctaaatgtggccacaatccccagttttatggctcctcagaatccagagacttcctattgatctcttcaaattcccaacaacaaactgggcacaaagtccacatccacggaaatttgatcacacacagcatttggaaagcttggcaatttgagggaaggtttggaaaactgtggaagtaatcacatcactcacctcccagccatctcccatactactgaggccatgcctctttgagttagtgaatcaatccttcctttgatccttctcattgtgtgataccctcaagcccttgactccagtttggtcctgattgcttctcccttggtgagaggcctgccaggctggccaaccttctccagggacctttggaaattggagtgaacaaaaatgttcttttcttaaaaactgaaatctagcttgaccttgactttatccttgactcctctctctccaatatggcagcaaaacttactggctcaactttcacaatacatcccaaatctgagcacctctcaccttctccactgccacactctggtttgagccacagtcacctcttgtcttgtttagtgcaatagtctcctggcgggtgtctgtcgccaacatcattttccacacaggaggcacatttatctttctaaaattgtatgtcactccagtatgtgaactcttctttgcttcaaagccctccagaaattcccatcttattcggagtgaaatacggagccttttcatggtaggcaagaccatggttggcctccaccaccactttgactttagcttctactgtttttccttttgctcactctgatccagccacaatcccctattattgtttgtttgtatttgttctgagttagagtcctgctctgtcgcccaggctggggcacagtgacgtgatcttggcttactgcaacctctgcttcctgggttcaagtgattctcatgcctcagcctcccaagtacctgggactacagatgtgcgccactatgcctggctaatttttttgtatttttagtagaaacagggtttcaccatgttggccaggctggtcttgaactcctggcctcaaacaatccacctgccttggcctcccagagtgctgggattgcaggtgtgagccatagtgcttggccctcttattatttttgaaactgccaagcaagcttacacttgggggatgttgcacctggtgttccctctgcctaaaatgcttttccttagatgtcaatatgacttcccacttacttgggatccctgctcagaaacacattccttggccattcatgtaagatgcactttccactctcactctctgatattttactctgctttattcctccacctagtatctcacacacacgcgcgcgcgcgcacacacacacacacacacacacacgactccctcctggcatctaccattattgtctccccctaccagcatataaacttcttgagatcaaggactttttgtttttttctcttctaatattgtaactctggtgccaaacacatagcagacgttatagaaatatttgctgaatgagtaagtaagtgaatttcaactttgagaaagtgtgggcctcccagggctgctcctgagccttgatctgcagagattaaaaaaaaaattataatagtgatgatgatggtaaggcccattacttgacctggagacacaagtgaggctatgtctctttagcatttaatctttagccctaacctacccagactaatgatgatctagtatttctctttgtgctgaattatgactgagcaccagggatttactcagtccagtggagtctgtcctgcttccagaacccctacagagagaacagaggatctgattagtcactagcagacttctgtatcccaatgcccttgatcctacagctgccacacagatggtgccattgaaaagaggtagcctgacatggtcctgttatgggaaaggggtcccaatttagaccccaagagagggttcttggatcttgagtgagaaagaattcaaggtgagcccacagtgcaaagcgaaagcaaattttttaagaaagtaaagtaataaaagcagggctactccatagacagagcagccctaagggctgctggttgcccatatttatggttatttctagattatatgctagacaaggagtggattattcatgcctcccctttttagactatatagggtaactttctgacattgccatggcatttgtaaactgtcatgatgcttgtggaagtgtagcagtgaggacgaccagaggtcacttttgttgccatcttggttttggtgttttttggccggcttctttactgcaacctgttttatcagcaaggtctttatgacctgtatcttgtgctgacctcctatctcatcctgtgactaagaatgccttaacctcctgagaatgcaacccagcaggtctcagcgtcattttacctagtccctactcaagatggagttgctgttgttgaaacgcctctgacagtccaaggtccctttgaccatcactgcaaggctacaggctgtggaatcagaagaactggggcctctcttgttggtgttacactcagctctggtgtccccatgtcatcatgggtctggagtcccaatgaggaaaagttgtgttgcttcctcagtcttgggcatggatgagtttcctccatttcgggtcctgatattataggttacagttgagacttgcatgtttccaaattatgcctgctgtttctaggggtctaggcttgggttggtccctagatccccttggtcctaccaccaagcaatagctctacatcctcgagggttttgtaaggaagagcctttgtcaggccaccaaactctcttgcggttccctttttcttgaggaaatggtggtgatttttctgatatttacataaccaagagaggccatgtgaggaattcttcccaaatatctgctccatttaggaaagaagaaagtggctgcttttaaatggctgctttccttacagataaacacacagttctgcctgctatgctcctccgtactccctcctaccatttattgagcacttgctagatggcagacactgtgctaaccacacattcacccattacctcattaaatcccagaaggatcctgagaaggaggtaatttgaggggtatttttattttgaaatactttattatatttgaagtgaatttcatatagatgtcatagagttaggtcatttaaaaatgcattctgttattgtctgtgttttaactggtatatttagaccatttacatttaatgtaatttttgatatgttatggcttatgtctgccattttatttttttgttttctgtttgttctcttggctttttgcttgtgtttttttttcttgccttcctttaaggtattcgaacatttttaaagaatccaatttgttttatctatactgttgagtgtatctttttgtgtagatcttagttcttgctctaggtattgacagagaaggagcaccatcatctcagacaaacactgccactttaagttccagctcccttactagcctcatgcatttcaaggaaatcacttctcttctaacaacaagcagccagaaagagcagacagtaaaacacagataagacagcttggacacagaaagaggtgggggaaaagtctcttgggtaactgccaaacttcaccctcatacaatgggccccagtaaaacagtgggccttaataagtacattcctttcccttcaggtgcactaagctagggaagctaagagactcaggggatatgcctgcagctgcagaaagatgtatgggaacagacacacaactctccctcccaaataagcacaacaaagaaacacagaagcaggccaagcatctaataaactctcccaccccaaatccttaaaaactcttagtctgtaaaaaagtgtgcctctgacctaactcagccaaatgcctctctcaggtttgttttctctaaaataaacctgtcttaactggcaatccacctttcgtgtttctttccttcttctttaattcttacaggtattacattatatatacctgattataacagtttcccactgtcaacattttaccagcttgaatgagtacagcagtcttacctcctatatttcccattaccctctcccacttataatcgtcttaaatatttcctctacattctttgagaatcatattgaacagttataattttcacttcaactatcaaagatactttagaaaacctgagaagaaaagtctattgtatttacccaaatttttgctcttatgtcctttattcattcctgatattccaaaatttcttgatttatcagttcctttctgtttagagaacttcctttagctattcttttagggtagatccactggcaaaaaattctcttagttttctttcatctgaaaatgtcctgatttctccttcattcttgaaggaactatcactgattatagaattctgggttgacaattcttttcttcagcacttggaaaatgttgtgtaccttccttctggccttcatggtttctgataggaaatctactgtcatgtgaattgtttttcccctgtaagcaatgaatgacttctgtctggctgctttcaagatttttttctttgtctttagttttcagaagtttgaatattatgcatcatgctgtggatttctttggatttgtcctgtttggtgttctcttatcttcttgaatctgtatgtttatgttgtttgccaaattcaggatattttcagccattatttctttgaacactttgtaaatcctacccactttctgcttgcctagtgggacactgatgacatcaatcctaaatcttttgttttagttccacacatccctgagagtctgttctttatttgtgtgtgtcttatctcaggaagtaattttgtctttctaggcttcatttcttcatctgcaaaatgggaaaattaatatctgctgttcaatatcatgatgcttaaatgacactgagtgctcaatgtttgttgaatgaatgaatgaacaaacaaatgagcaagctgatggatagaaatttgccagtttacttgtcagctttgtaatattaaggtaaacactttctctggccagacttcctgatctctcctcttaccacctctaggtaaaagtcccttgtagcctatatctgcttttctcatactgtgggtttgttatcttcttagcatgtggcgggatttccaaggagactagatctcctcctatctcatcctcagcttgtcagatgctgaataaatggtcaccaactactgtgtgtcctatttggccaaaatgacttctgaatgctggtgcggagagagcagagggcaggcctgagatgagctattgggagttggactgtggggacagcttccaccccagccacctcaaaatcttgtgcttgtgtctttgatatggaagcagcttgcagtggtgatatgctaacatacaagtggggtgaaggcaggagagtccagggaccagcttaagaatcaaacacacagggccagaagagaaaataggcaaaagtttagcttcgttgttttttttttttttgagatgcagtctcgctctgtcatctaggctggagtgcagtggctcaatctcggctcactgcaacctctgcctcctgggttcaagagattctcctgcctcagcctctggagtagctgggactacaggggtgtcccaccacgcccggctaattttttgtatttttagtagagatcataatgatagccaggatggtctcgatctcctgacctcgtgatccacctgctttggccttccagagtgctgggattacaggcgtgggccactgcacccagcctagcttgttggttttattgggcaactgatgaactattgtggactagactgggtttgatttatgagtggggtagtacatttattgtgcttcctgagtactcagtgacctcttatttctaagtacagtcaagtctttaccaatcacacacaaaagtacatttgatagaggttgtaagtggttcagcaaattcagttccatttctggggacagagcttggatctcatgctgtgatgaattattatgatatcttctttaagtatgagaagagtatgcataaaacgatcaggtcttccatgcccgtgggcccttttaagggagattgtatcaccgtcggtgataagagatacaggcatcagctgtggacccccaacagacccaagggtagacaatgtacaggctggtcatgagaaaatgtgtgcatgaggctctgcttaatgaaatgaggtgaataattaggacaatctgacaatctctccatagaatgtcaccaggaagtcagagaaaaaaacagccaataaatagtaagggaaaaaataagaagataaaaggaatgagagaagcagagaccaaatgagagactgagttatatcaatggtggagaactctttgtgttgaggggatcaccatacaactcagttcctgaagctgcctctcagtccttttgaatggatctctgtccctttgctatgattaaaagaacttgctttgcataggaaatttaccaatatgggatcgctagccaaatcaatcagtaaggccattcttaagccagtgcttctgggatttgaatgtgcatacagttcacttggggatcttgttaaaatgcaccttccaattcagtaaattggggtggggcttgagattccagtttctaaaagctcccacctgaggctgatgctgctgggttggtggaccacactttgagaagcaagggcctgaacaaacaccacacacacatgcatgtgcacacacacaccattcatcaccaattaaaagatttggcacagaaggtatctgaagtcccacggaaaaccactagatgattaactaaacttgttacttttcacttagctccactatagagctagaaaaagaaaacgatgacattaaaaaagagcaaatgcaactgggcgcagtggctcatgcctgtgatcccagcattttgggaggccaaggcgggcagatcacgaggtcaggagatcgagaccatcctggctaacacggtgacatcccgtctctactaaaaatacaaaaaattagccaggtgtggtggcaggcgcctgtagtcccagctactcgggaagctgaggcaggagaatggcatgaacctgggaggcagagcttgcagtgagctgagattgtgccactgcactccagcctgggcaacagagcaagactccatctcaaaaaaaaaaaaaaaaaaaaaaagaaagaaaagcaaatgcttctaatttatttttggcacaaggtttcaggttatgttaaaaattaataataaagactctaacttgttaatttttttatactttagaacaagaaaatttagtgtttaaaaaactatgagagtttatttagccttctgaaattgtacctttaaatgtctcccaggggaagaatcatagaacagtggggaagaaatgcattattcaataaatggtgctggaaagatagtttagcaatttggaaaaaaaatcaatttcaagtctcatcttactgcacactaaaataaattttaatggactaaagaaccaaaatgatataaaaaagactataaaagcacaaaaaaactctactggggaatacttggtaaggttaaaagagttgaacaaaatcgtaaaagaaaagttacaaattttattaaataacatttaaaatttctgtctgtagctcttcctgtgtctactcaacaaaaatcaaaatagttatgaaagagtataaacactaccacaattggaagacagaatagttctattaactctatgcatttgtcaaaactcatagaactgtaaaagtaaaaactttacataagctaaaaaataaatcacaaaaaggatataaaagaaacatagccgctgaaaacacatgaacgttaaaataccaatcaatcaactgggagaaaagtattcgaaatatgcacaacaaactaaaggttgatgctcttgatacataaaactgatgcttgatttggcaagcatgatattaatatcccaacaggcatatagatgagtagacaagtcacaaaagagaacatttagttgtctaaaataataaaatgcaaattctcttgtcattggtgttttatgtccctcccatcaaatgagtccaaaataaaagaataatgatatttcctgatgtagatgagggtgtactgcagtaggctaatggcctccaaagatattcatgtcctaatgtctggaagctatgaaaatttctgtcttagttcgttttatattgctataaatgaataccacagactgggtaacttataaagaaaataaatttatgctttgaaagttctggaggctggtatatgaaggtaccagcatctggtcttcttgctgcattatcttgtagctttcttgctgtgtcatcccatggtggaaggaagaaagggaagagagtgtgaaagagggaggggaaaggggccgaactcatccttttatcagaaacccactcctgcaataactaatttattctaatatgaaagcattaatccagtcatgaagtcagagccctcatgacctaattacctcttaaaggtctacctctcagcgctgttttattaggaataaagtttccaacacatgagttttggggggacacattcaaaccacagcaggtattttataagacaaaagggatgctgcagacgtgattaagttaaggattcagggatggggagatatcctggattatctaggcaggtcctcaatgtaattacagtgtccttataagagggaggcagagagagatttgtctacagaagaatggcaggagatgtgatgatggaagcaagatgttggagtaatgcaagcaaggggtcaccagccaaggaatgcaaatggcctccagaatttacaaaaggcaaggaaatagattcttcctcagaactttcagaaggaaccacccctgtgacaccttgactttatcccagtgaaactgattttgaatttcttgcttctagaagccataaaagaataaatctgtgtaatttttaagcccctgaatttgtggtaatttgttacagcagcaattggaaactaatacatgcagtaaaacaacctttctcatacattgcaaatgggagtgtcaacaatgcaacatcttctgcaacatttttataatatgtacgaaaagctatggaaatttcatatctaatgatttagtgattccatatctgggaatctattttaaggagacaatttaatgtaatgaaagcagccctcgtgtaaaaatgtttgtcattatcataatagcaagaaactggaaataaattaaatgttcaacagaaaaagaaagattgaataaaattataaactatctgagaatagatgagagttaatctataaaatatttatatatatttgtaatatggggaaacactatattctataaatactgtatgaatagcaaaagtcaagctaaagattatatatgcatcacgatcttgactttgtaaaaatacatagaaatgagattggaagaatataggctaaagatttattgggtgagaataattatttttagtaatttaactgctctgtcttttcagattttctataatgagtgggtattagctttacagttaaataattattaaaatcagtaattggaagtggagggcagagggccttccatgcttgagcctggtgttatggccaaaccttgaaagaggtaggtccgaagaggttgttttgggtcaaggcagagagttaggaagaaggagtacacaggtctcaagggcttggctggtgcaggtgggagtggcagaacagtgaaaggtgacagtctattaaggagaggagctggtttgatcgaggagagagctatggcaacttgttagcagatttgagaaaaattagatttcactgttttgaaagatgtcttgttagaaagaggaatagagtaggcagtgttgattgtccacccaatatccaccaccctttccatttcctggcagaaccccaacactgtgctggtatcctcccttcctcctccactcagtccatgtaagtaagtaaaggacgcacatcccagacttagctggggacaggaagggagtggggtggttctgactagtctaagccactcacagaaaacctatcctttctttctcaatatatgtctgcagaacacatatttaagttcctgccatcacagagcttagaataacatctcctactcaataaatgctcactaaatgttgatgaatggagcaatcagcccttggcattcccctagcaactgttatttgtctgagagtagagatatgacctagtttggtccaataaggctgaagggaaggactttaattgtcagatgaaaggttctctgtgtcctccagactttgaacaaaggacactaccccacttgctgctgggcgccatcttgccaccctcaggagcataagaaaaaagtcttcacagaggaggcagagcctaaggaatctccaagaaatgaagtcacagcttaccctacctctgtctttccagttatgagttaacacatttcctttttatttaggactatttgtgttgggatttctcatgtagggtgtaataaaagtccatggattttttaatggcaaacttcaaaatacttagaatgtctagaattccaatttttctgggtcagacactctgtggaacaccaaagttatacaagtggttcataatcaagtccagatttttatgcagagatggaactagttgctcatcagattgacaggaagggatagaccttgtctttttggtcttggaaagtgtgtgtgagtggttgttttgttgggtaaacatgtggcaaagaggagcttcttgtcctgggttagggcatgcatcaatcaggatgggtaactttatgctgcaataacaaacaactccaacaacaaaggtttatttcgtgctacactacatgtccatcatgggtgggcgagtaggtgggctctgctcattgcatctctcacggactttggttgacggagaagccacaatctcaaatgttgctggtttccttgccaaaggaaagggaaaatctcagaactgtgttatgcaggtaatgaaatgcaccaccccagaagtgatatgcagagccagcttcatgggcatgcaactcttgggtagtcacacagggctccattctcagaagcttgtttttttttttttttttttttgagatggagtctcgctctgtcgcccaggctggagtgcagtggtgcaatctcggctcactgcaagctccgcctcctgggttcacgccattctcctgcctcagcctcccgagtagctgggactataggtgcccgccaccacgcccggctaattttttgtatgtttagcagagatgggttttcaccatgttagccaggatagtctcgatctcctgacctcgtgacctgcccgcctcagcctcccaaagtgctgggattacaggcgtgagccaccgcgcctggcccagaagcttgttttaatgctctgctgttgccatctcaaaattattaatacatttttgaacaagaagattcttactttcattttgcacttgactctgtaaatttattttttaagtttttttttctgtgcacctgtgggttatattgaaaaagtaatttgttgttgtttttca[133 bp omitted]acctctgcctcctgagttccagcgatcctcccacctcagccttttgagtagctgggactatacgcaccaccatgcctggctaatctttaaacaattttttggagagatggggttttgccatgtttcccaggctggtcttgaactctcgggctcaagtgatccatccgcctcagcttcctaaaatgctgggattacaagtgtgagccattgcgccagctggctctgtaaattatatagccagcctagtcatatgtgtcacttgtacttccacctcattgaccagacctcgtcacattgccacatcccaaccacaaatgggcagagaagtgcaattctatttgtaccagaaagaaggaagaaccagaaatatttcatgaacagcatagaagacaaccataaagtgtctgtcataagtcttttgtttttcgagactgaggggaagcttcctcttggtatacagatctttgggtgggtggaagaatttatttgcatatgggcctcaggatcctctgagagagaaggcataaagattccaactgctgttcctggatattcagagttagggaaatctgttggtgtgaaccaagcccaggggttgggaaggacaatgaggttccagggttggaatgaactaggccgaggatggggttaagcatgaagacctagggaccttggtgagggagaacttgctctggtctgacatgtgtgtggctgggagccctctatcacagtagtctttgggatgtgatgagtgcgtgcggccttgtaaaccaagatagctgcaacctggtatctcaaacacagggccgtcactgcatctgggccaagaacattcattagcaggggacaaagatgtattggcccagtctttgacactgacaaaaatgaaaagttgtagcctcagaaattggtggcactccaattctcccttttatttgcatttggaagtggcagtgatgcccccgtaaactgattcagactctgcagttcttagaaaattggtgaggaggagcatccttgagagagatgctaaacttcccatagcaggacatgaatgatcagttaaaaacaatatgaaagaagacgctcatgtcatatcttgagctagagaagcagttcatatggttgcttgcagctcagctagaagaactgtgcttatgcaaagttgtctaaaagggccctatcaacttgggaggaacgtctctgctagtccttggggcagccaagacaaatatcagtggggccactggactctgctgtggagaagaagctgtggggggtgcaggttcatggggcctggactcagccagagcatggatccctgggctcagccagagagtggaggctcagggagtggtgagctcattgcttggagaagttgtgtcccagaagacctgcttggattcatggcatacccatggccatgtgaaagagatgagtgggaccaattctgctcttcacttattcaccccaaggtcagggctccttcagctcttgcagagagtcttctggaaaacaggcatagagaggaaaaactgatccagtgcaacaagcttgatgaaatgagcatttcccctgccctagatgctgttggtgcccttcccagatgccgtttcccaggaagcagcaccatttatccatctgctctgcgtgttggctgctagagggggcttcttctcctcaaaattgccattagttgagggggagccaccttctctgggaggttatgtgttcttgctgaagaagagcagccttcagccaatgactgacatggtggtacaaaagactggtgctcttttctcaggatgggtcaattcacactcagaactccctgctaggttccagctgagccaaatccttgatcaggcccttcctctgccctgtctgctcttctcacttcctttctcctgatatccctcttccaataaattaagtgcatccaaatctgtctcagactctgcttccagggtgcctgccctttcttttgcgggcttggggaaatgttttgctaaggaaggacaaggttcctgcacagtgggatgggggaggtggaaaaaggaggcagtttttttttcaatggtggaaataaacttcccaaagactgagggcaaggggtagcctgaaagtctacatgggtctccatgcaagtccaaggggatcatggaaaaccactcatgatttgagggaccatggccagttttcatagtagggatgtggactggggtctgagttgagactgtgttttgatgcaagtcagtgtggtttgggaaaacacagagtcaccaatttttgcctttcccccatttttcttgtcccctttctccatcctctcttcccagatttgctcctcacctctagaactttccattcattttaggtgaggcaggggttccatgaagggagctgttatgaggctgttcttgctcagtgatgctgcactgggcactgacttttgaccagtagcttctcactctgactcagctacatgaaccactaagaggagctgtgcttggtgaacctccaccctttcactgaagtgtcgtgtgtggccctagttcactatggctctgcccacttctccttgttcttcttactctctctatctttagaatctcctggctttgtctttggatttctggaattctagtttctctttacagggtttctgacaccagtctgatggtgtccatgtttctttcctgcttaaaatctttcactgttgtccgttggcccttctaagatcttcagcatagcttgcaaaaaccgtgcttaatttacctctcccctctgcagctcgtaactccccgtcccatgcacccctgtcttggccctgcacatcatgcagctctgctctgtttctcaaattactacagattcctctatacctttattcctactcttctttccctttagattgcttctctccctgactgacttttcaagaatagcttcaagctactttttctctctttacgttgtcttatcattctgggggcaactgcctgccttgggctctttcatgactgaggctccatcatgagttctgacttttaactctcaatagcaccaatgtgttgcacttctagactacacagttaggccctaagctccttggagtctagggcttctttgaatctctggtgccctgtacagtgcctggcacaaagcacctggggtagacacagtgcactggactcaccatccattccaatttccttctagtgaccttttaatatgaaggggctggaaaataaaaatccatatgtgccagatgcccctgaagccagggttctgaaggggattaaggctaactttctgttgctttcattggttctgctgataagcaggcaatgcccatggaaacactgagtttcctgtagtgcattctagtaggtggtcattggtttcataggtgctgagaggcagggctcaggacaaccacgttccatgttttttttggtcgatgtctacagagtgtgaccttgctctaaacaggtggttgcacaggaaacttctgaccctgacaccagtaaggtgatgcgtccctgtgtttgtggcataggaagcaactgtcttgcggagttgttttgggcgttgttgctgagtcttgtttttggtgtcatggctctttcaacctttccaaaagttttcttagtttcttggattagatccattttcacttaatgcagttcaagtagctcccattttctgcaattgatctctgactatacagtgtttgcagaattgaaggatcaactgactcatctaatgggttcatttcacagatgaggatgctgaggtgcagaaacagaacaaagtaaggtaaaaaaagggtcagaactggaacccagggcctttgccttttagtctagtgcccttcctcctgcaccaaagtgacatttctgttttcagtgtcctcatccttccctgccttattctgaaactggcccaattttccaaccagccacagagctgaaacccatagaactaaagcctatagaactgcagcttgagaaacttacatttgaacaatgaaaactcctgctccctgttggccaactcctcttccttgcccttctgttttcctttctggctgtataaacctttaagttgagtcagggaggagggatggatttgaggtttggctcctgtctgacatcacctgtgatataataatcccttctttcctgacaatagcattgtctcagtgattggctttctgtgtggcaaacaatgggacctagactgaagccctggtgttcagtaacaattctctgaaataaatctctcccttcagtaggtggggtgggtggggttggtctatggctttgaatactttacttatattttaatatcttactgctgatggcacagaaaaatcttttagtgattttgtgtcccatagattcagctttggacaggcattacaagaacactgggaaggggccaacactcatctttagccacctcacttttgggctctttatgttctcccatccttgtctctctttctcccttgaattctctaaggaagtgggatgcgacagacactgctggtgcgctgtccatgatcgtgggtcataccattgaggtacatgcaggccctacaacttttagctgccagctcctgaatctttctgcctaagggctttctttggaagctgaggtacattcatcccctgcagctggaagtactggagaattaactcccaccctaccagagtaattctcaacaatggcaagtggaagttggtgtataaataccccagcttcctagccgcttgggtgggagagctctctgtcatgttctacattatcctcagagttccccagtgtatttgggctccagttgcccaatagcaataactttctggttagcacactgtgttgactactttctcttctattccccgtttcacttccccacttccctatcagtatttaccagaataactttcaataaataacttgctctaaaatccttgtcttggggtttgcttttggtggagcctaaataagacagaggtctttccctgtaagtaggatggcaagtctctcagagggtggtttaggaagcaggttgggaagggatttatagacagagggttcttgccagagcccactaaacttttccctggagatgggtcttatagacccctagtgcctcttagctgttgtccctgtgtgctgctgccagctgacactcttgctttgggtccccaagataggctccaaaaagtagattcatcttagtaaaatcttcagtgtctaatgtggtgctcttgtcatcccattaaagagggagaatatctggtcccttggtcaaacaataaattcttcagaaaatggtgtaattaccctgtgtttaccatttgagttaatctaacttctacaatataaggtttacttcaacgactcctacctgcatttggccaggccccaaaaatctgtaaactagagtagaaaatatgctgtcttttgcctgtacagagcaatgacgtgtgggggcagaggtcccaggaggcaaagaaggatgaaagtggctcacagcctaggcctgcttcatcactcaaccccaggcattttcttctcttttctttttgtttttgaaaaataagctccagagaaatgataaggagttttaaaaataaaagccagtggggcagcagcagcatccctctccctggcacctctcctcttcacccgtgactctcagcacatgcaggacccacagctcggtccctagggccttgttctccagcctcctccgccacctttggcccgaggcctctgccctgaggtccagcctggccaagggtggccagcagagcagggagagtcggaatgacccacacactcagagataaggctcccaatttgttgattcaggggcttagttattctctaaataaacgttcctgcttcaaaaacttttctttcaagtggagctgagtgttgccttcttactctttcccaggggagaagtttgtgttttgctttttctaaatttatgtaaactgttcccacactcacacccactaaataccaagctcctctgatccccccttctccagaatggccatggagccggggtgcttgggctgtgatgaaatcacacatcctcttggagtcccatgggatcaagtggcggtaggggcaagggggtttctgctgcaagacaggaaacctgaaggattgaggacagacaacgccctgaggtcacataagaacaggcaacacaatctgagaaagtcagttactctgcctccattttacagatgaggaaattaaagtgtgaggggagtgggttgaggggttagtgaatcatccacatgagtaatggaaagttcaatccaaggactctgcccctatgcttctctgcttttccaattgatagtgcaactttgtcactgtagcagttagctatggccacataacaaacttccccagaacttagtggattaaaacaacaactatttacttagttcataatttctatgagttgataattaaccaggcttagctgagtaattcttattctactctcacctgggcacattcctatgtcttcagtcactcatttgtcactaatatttgatggcctcactcacatgatgtgattggctggctgttgtctggtgtgatgggcgtggctgaactacatgatttcttatcctctagagggctagcctaggcttattcacagagtggtagctgtgggtttcccaagaccagcaagaaagaaaattctaatgcatgaacacttttcatgtcacttcttgcatcacatttattactgttctgttagtcaagcaagtcacacagctaagctcagattcaacaggtggaggaagactttacctcttgatagagcagcaaagtgactttgcaagggtgttgatacaaggaggggaacaacttttggtcctttttgcaatctaccactgttacaaacagtacagtggcccaccaggccattggaggggagggaatagagctctgctgtgtcctccaagtgccgtgcccagtgctctgtcattgccctacactgctgatcatacattatcttgggttaggccatttgcatccttcaccgtcagtcagtggcagagagagagaaccttgagtggctgagagatgggacactggggagataagttttggtgcagggaaaaggattgaaagcaaagaagcagaggtcagaggaatgcctgggcccagcagagcagcactgctggtgcaatgtagtgtgaacagtgctgagaatattccatgactcttatttgccccccgtcctggaccccgctgtctcctcctctcagcctgggcctccctgtcaagagcatgtccatccctgtttgattctctctctgtggttcccaggaccctttgttcatagacaagcctattgatttccacttttttttttttttaagtcatggagccatcacatacttaatatactatccttcccaagggcattggaaatacaaataaacgtggatggctcagacctaacaaagacagtaaagttgttcagaatgatggaaaattaacatgtggggtggcccacaagagcaaatgcaatttgctgcaagtaggttggggtgggcggcattctgtgaggcctcccgtgttatctgaaagtttcactgcatttcttggtatactaaatctgcaggcttagtcctaaaacagtatctcagaccagaagcacaaagaacctcaaattatgaacttgatagttggaaggagtcttagataacagtgagacccctctccttttacagcccataacaaacagctcttggactggcgctgctttgtggatcccatttgagcagctctgctttagagggacctcccttctccctcctgcactgtgccaaggagaactgcccaccaggagttcaggccaccctgccgcctccattccccaccccagccatgctcaggatatgcaggactcgggaattccctgtttaaaggcctcagcccacttccatgtcctgtgtgggcatctcctctggggttgtcctctcaaagtgagccactggtaagtgttcccaggaaggaggggttgtgaacagagcttggacttgaaggctcagtggtcagcatgtgtgcgtgtgaaacccctttatggtgtgggtggagccttgtgcgagaagagggtgggctgcaagtccaggaggaggccctgaactctcgtattaccacccaacaatgttagagacgattttgcctcagggtttatggtttttcctgccaggctgtgactgatggaaagcagggaggtggaggctgagaaccccggctctgtagtcactgctgcccacagacagcagacctaccagcctcggcacgctacctcttggaggggctgagtccacaggagttgggagtttcttgccagtcctcccgccagcatgtccctgccttcctagccctcaccgagccttattcttattctctctcacatagaacctggcttggaccctttcatgctcctgatctctgtcctgtttgctatctcatgggctgactcagtagcagtcagaggtccctggcaagcaggatgacttctcccacattctattagctctggctcaggccgacagccacatggacagtctcgcctgtggaagttcttccatcaccctgactcagtttctgaactgaaacagtccccatgaagtcctaagatctgagttatttggtgtatccacctcccccacagggttgatggtctccaagagcaagggctgcaggcttgatcttggcatgggctgaggatctcaccaaggtcctcgtctgctcctttaaaggtgggagagaccgtctcttactttccttatcactaataccaactggattttcaagtctcaggtgtgtttgaagttggcctttggagactcctacacacacacacacgtgcgcatgcatacacacacctcacacatgcttacacatatattcacacacaaacttgcgtacatacatgcttatatacacactcaggctcacttataaacataaacacacataattgtgtgcatgtttgtgtatgcacacatgcacaaacacacacaatcacagttgtgtctgtgctactcccattgctttttggctctgatggcgctcagcagatggaggtccaggctccctagatgctgtcttgccagctgagaggctgaactactgccgaaatttccagggtccccttgtggcatttcttgataacaacatgagctaagttcatttctcaaggctgtaaactatcgtagccatcctgccctttcagatgtcagcttattgacgctggggcttggtttgcctctctcctctcaagatcaagctggcagcctggaacgtttttgaggttggagaccaggaagcctccaaacctcaccatgacctcctacgtgtcatgccagcttgagcaagtgcagtgacttagagcaaccagcaagagaggcctggaaaactccctccttggctgcctaaggcagcaagagagaccagaacaaagatgcctcacattatttaggatggatcccattgatgatgaatgtaaaagtgctttgcaaactgtgaagcgctgagcatatgtaagagaagatgttcattttgaagaccacaacaggtttgctgtcttctcggtgagtggaggttgtaccttctgcagaacacttcctaagaccaaatcagccaggggtgtctctttggcagtcagcgagaggctgggtgcccattcccaggcttggctctgtatagtctgcaaggaaaacaagagtcatgggactcactccagggaactcccctccgggaaaaaagctgggaaaagtctccctgtatagctgcaggcagggctgtagatgccagtggtcaggtggggaagaaacaacctcttcttggactatggtgcctcccttggagcagcttagcacttagagaaccggccctgattgtgttcagatggtgatgctattggctgtgattatggttatgattcaagttggcaatgagactcgcaagatgcaattggcttgtgtttactgtagttactgttttagttcattttctgatttttataacagaacacctgaaactggcgtaatttataaagaaaacgaatttatttcttacagttatggggactgagaagtccagagttgggggccatatctggtgagagccttcttgctggtggggactctctttgcagagcgtcacatggtgaggggttgagcgtgctagctcaggtttctctcctccttcttataaagccaccagttcccctcctacgatgacccattaatccattaatttataaatggattgatccattcatgaaagcagagcttctttttttttttttttttttttgagatggagtctcgctctgtcccccaggctggagtgcggtggcgcgatctcggctcactgcaagctccacctcccgggttcatgccattctcctgcctcagcctcctgagtagctgggactacaggcgcccaccaccacgcccggctaattttttatatttttagtagagacagggtttcactgtgttagccaggatggtctcgatctcctgaccctgtgatctgcccacctcggcctcccaaagtgctggggattacaggcgtgagccaccacgcctagctaagagcagagcttcttaaaggtcctacttcccaatactgccacattggggattaagtttcagcatgagttttagaggggatatttaagtcatggcagttacttagctttacagaaggatacagaaaaggggatacagggagctcaacgtcatgttctcctcagcaaggccagcagttacccaactgcacagcctcgtaggcctcaagtagccccagcacttttgggtcaccttgacacagagaaaccacagcctttgctttctgccatctttctacactgcttgagtcagtgaggcctagggcctgaatgccaactcaagattttatatttatcctgtagctctgcagaaacagggcaataagaagagaaaggtcaaggtcattcccaagcctacatcagcccagacatgatgctaacccttccacacacggatgtaatccttgtcactgatagttctagctgttcctaagcctccgttctatgattcacaggtgaaaccagaacccagggaggacagaagacttagagtttagccttccacactcaatataagctatctagaaagcccttttcagggcaatagtggaaggcaaggatttgtgcttgccagagctaagcattgttgggctataaaatggctttctaaattccccaaagcttctctatacttattgggaaggttccatggcatcccattctaagtcatggcttagggtgggatggactatgtgtcacctggaggggatggggatgtggaaactctttctgggctcggtaaggatctatgggctggggaagagggaactggggcattgagacctgctccctggctgccctctagataaaagtccagatggttgtagatgtgtgcggctgatggagacacctggaaactcctgagcagaggggagtgccctgttgcccacctggcagaggactctagagtggcctgtataatcagggaaagatcatgatggagtagaagtagtgttgaggtatggttatgctgagaggccctgagatatctctgcccagccctattctagcctcttgtggactctgtacggcttagaggagaaccgggaatatgcctgtggtccctagagaggggcagggaagggactgagaggcagcatgccagctggggagtcaccatgatgccaagcaagggcacgttctgtcatcatccctgacagaagctgaggaatgggtagcccaaagtcaggggccagattgagtgaatggttgaacctcatccaagagcctgcaacccacccccttcaacagctaagacagcttccctgtggtagcacctccaacttcagggcctggctcagcctgggagtgactgagattgagcttagttaccatgtcccactggtctggcatctcttctttgcattcatgccaacctctcttcaccttactaatttcccataagcccctggagtcagcattaattcccctcaatggttgatttagagaggagccaaatagcccacgtgttatttttctcagcaacaaattaagttaatgaacaaaccctggccattcatctctgtgattctggctggggagctggaggccacagcactgtcaccagcagcaccaacatcactcccgttttcctctaatcaaaacaatatattcttcttcgatgcattagagttgggaagtggggagtgctgctgtggtggtgaacagaccaccctcaaagactccagtccgatgaagagaaatgaatcaatcttggcatcatgacaagttaataagagaatgccatctgcctcccccagtgggagcccttcagtgcccaaatctgtagcatctttttttggttctggctggctaaccagactaggaagagtaacttgggagtgggaaagagaagggcctaggagcctggtgttggacacctctagcggatgcccagtggctctgattacaccctgaggggaagccaagagactctggaagattgttgggggaggggtgggtagtacaggatgattatgttctcaaccaagcctgcccttgggttgggttcccagaaacaggccagagacaaggattagggtgtaagtggttaaattgggagatggaggaaactccagtagacagagaaaggaagatagctaatgaagaatgtgctattaagtcagttcccatgtgggcaactggggcttgaggctgctggagaactctgggagccagtataggacacacaccttagagttttcccatgtgagtggggaaggagtggggtatttatccaccattccctgtccatgatggttcgacgggtgcggctgggaatgttaactctcaggcactctaagtttgccctatatgtaggctgagtgggctccctgactcaggaaagcctccaggcagtgagccacaggggcttttaaggagcagcatttggtgtggagagatggacaggcactggcaaatatctgctccattgtccaagccaattcttcagctggatatccctttgtgtgacttgctccctgccattctctcagtctctctgtgtctggaccttgatttccttaaagtccttgcttctcctccatacgcagtcactagtcatcttccttagattgatctttcactgggttttacccacaatctccctgggtccctcctctcctgctgtaacctctgatagcctagacccaagggttctcaaactcagactgcagcaagtctttatgaacacactgttctctattcagactgatttagactgatcttatacctctcatggctccccattttcttcaagataacacttagttctcttattctggcaccttcatttttaatcccaatttccctctttagatttgtgtttcagagctcttttatgtcccattccagacagcgtgcctcaagcactaaatttgtagttagctgacactgtgttctgcctcatgatgtgcctgccaggaatacctttctttccttctgtacttaagcagatactacatgctttagagaactattcagactaggaatcaaattgcaggagtcagtgctgagctctcaggtcctgtttcaagagagacacagagaaagagagagagagccaaagataattgagcattctctgagatgcacatatttccctgtcaggggtggatacacgaagacagcagagaagatattgagcctaagtcagattagaaggtaaacttttcattagaaagaaccattctgggctgggcatggtggctcacacctgtaatcccagcactttgggaggccgaggtgggtggatcacctgaggtcaggagttcggaaccagcctggccaacatggtgaaaccccgtctctactaaaaacacaaaaaattagctgggtgtggtggtgcgtgcctgtaatcctagctatttgggaggctgaggcaggagaattgcttgaacccgggaggtggaagttgcggtgagctgaggtcacaccactgcactccagcctgggcaatctctgtctcaaaaaaaaaaaaaaaagtatcattctggtcattgtcttataagcaaaaataagattggaaattagaggaatgcaacaaagcaggcagttgctggaaataggacacagaatactccaaatcacagcccagaacattaatgccactgaacttacacttaaaaacgtcaaattgtatggaatgtgtattgttaccacaattaagaaatgaaaaaatataaaagaaaatatctatgtattattacaaactcaccctaaaacctacccggaatagcataattgttgagggtttggagagtgggtgagtaaggggaaaacttctgggtgatattgataagtattctttaaagattttcaagaccagcattctgaaacaaattcataacctggatcagacagaaggacttttctggaagaagagaattaagcatctggacaatttttataaacacccacctctggctccagagcggtgagcttgctgctgatggtttttggctgggcatgagcagtctgaagagaagcgcactgttatgaaggtcaggctagccctgagcagaggaggaggaagaaggctttcttgctaccacatcttgcagcaaaggcatgatcagtttgtttgagtgacaaagccaggaggaggttcagaagttggagacagtgtccaacttcctcccagtgaggggaaacaagtcctcgccttgagttttccccttcagaggaagacacacactcctccccaggtacagcattccactgatgggtggaagccctggcccttctcagccaaggccttaacagcaagcatggcgcctgcttttagggagctggaggtcagatggagcagagccctcactgtcctcagggacctctgggaattagaaacatggttggaaatattatttggagataagagtttctgggagaagccgggaattgcctgtttttccaaaacaaacccaagtgaagccagcctgcaatttctaggcagcctttggcctttggcagtagtggggacctctctcatctccagcaatctggattaagtaggacatttatctcacttgttggctgaggcgtccctgcccctatacatcaaaataaactggacttaactcccagtttcacggcctctgatgaagcatcttctaagtgacttctgtggattattgacggctgttttcctcatggtgctcttggtcctggtttctgcatccaaacaccaaatgtctatcttgtccgtatgttaaaaacctggacacatgcagacctttcactgttttttttccccaaaatgcatcacaacatgcatcccataaagtttattactcttatggaaggtttgagggatcatgcaccatcttcaactaattttgaaagtgtccctccttcccctacctctctctctcccactcccgtctctctctctttttcctgccccctctcagtagccaataattcctttccttgttttagtgaagtgcttttcctcctctccagtcttggcatttgctgtcactctgcccatgaggctctgttctggcccagcaggcttcttcaggcaaacctaaacaaacataatgttcacctggaggacttctggtaaattcaactctctccacctcctacactagagacaattcagcctacctgggaaagagatattttatcatgaattagccaaatcatcccttcctattgataggagatttaaaaagaatagaaatgattaactttacaaatatctgagatgcagaatcctcaaatcatcaaagaaaaaaaaagaagggttaacatgcaaagcctatcaaaatgtgtttcaaaccaatgcttctcaaagttcaacatgcacacaaatcccctgaggatcttgctaaatgtaggctctgattcaacaaaactgtagtgaatcctgagattctatagctttcacaagttcccaggtgtcactggcccacagaccaatttagaatagcaaagttatagaccaagggatttgaaagttgactgctattggaataacctggggagcttaaaagatatcgatgtctggacttaccccaagagtctcatgtaattgagaatggctgggcattggtattttataaaattttcaggtgttttgagtatatagctgaagttaagaatcactgttctaaaacagagcatcaagctcatatattaatatctgatcttttcctatttggagtacttgagcctgcacagaggtggacaggaggaaagcacaaccccttcctaagggggacaccaattgtcacattccaagcagccctcaagggctctggggagaaccgggtagaagcccagctttaggattgctgtgctgatagcaaatgatagtaaattaaaagaatatgctaatccttttaattaattaataaaatggcaaattgagctaaaataaaaagattaaaaggataaagttctggatatcttcaataagctaaaaagaaaaaaattttaaagaataaagtgataaaatggtaaaataaagtggtataacttgatataatgaaaaagcaaataggacatatttgatacaataagatgaatgtttatgattaaaaattaagctaccatatactcttaggttgaatataagaaatagccaatatttgatctcatatgacctaacgaaatggcaatttcatgcacctgcaaaataacaaaatgatgaaaaactagaagatttaatgataaagcaaaataaggttaaatgctaagaattagcctcaggaagaagtcccttgggcagccctctgtgcattgatgagaacagtgtcctggcctgagtgcctatgagggcaagatccttccaactgggtctcgctgaggcttgggatttgggggtgacacgatccccagggcagaaagctcttggcattggccatctggtacttgagtgtgtgtcttgagatccttgccaagacctttaactgctctcagaaagcatccccaggtggcttttgttcctaacaggtagcaagttctttagctcaactcattggaaaacagcctacagactgctaagattcttattagagacttggagaagggtactgctggcaggctggtcagattcgcagattcaattccatttattaaacatttattaaatttctcctctgtgccaggccctgtggtaggtgctgaaatatggcagtcaacaggagattagagagtgctgcgtttaaggtctggtagcttagggccctggaatggagcgagggggtgttacaggttggggtcccctagaagtggaatctgagatgaggtttagcatgtggatctattggagatctggggatcaaatcctggggcactgggagaaactgggctgcaatggaatcccaataaaggcctcagttctccctaaatggagctctggtgctgggatggctcttctgagtttttcacattgcatggagtgtactgagccttgctcttccctcattgaaacaacgcatgaaacaaaatacttagattacaattatagatatatagatatattagaaaactaaatttgtgatgtagtactctatgtgtttctttaatgacccattaaagaatcagatctagcagtgtatcaaataactcttgcattttcaaagtcgtgctgaacacaaatgacacctacggaagatatctatgagtgtcatgaaatgtgaaaaaaagtgtgatttctatatgtaacaaagcttcaggtattgctaacaccactgtggtttgttacttacattacataactgaaggaggtgctaagtgttggttcacattagttaactaaatattagtttagttaaatgttagttaactttttctcaccaggttcaaagattccctaaattctatctacattcagcctgaggataccagcataaagatccctggagtgactatagcagggagttggcagccaacaaggctgaggaccacttatggggtcagatgtcaaagggctcatgccatgggtggcggggtggggagtctctaacattccccaaccctccataactttatactccttcctctggcattcaaggaactttcattttaatctgacacgaaaccgtcatcccaaccaggaagaagctttctgttttttgtttttttgtttttctttttttattattatactttaagttcggggatacctgtgcagaatgtgcagctttgttacatgtgtatacatgtgccatggtggtttgctgcacccatcaacccatcatctacattaggtatttctcctaatgctatccctccccttgcccctcaccccctgacaggccctggtgtgtgatgttcccctccctgggtccatgtgttctcattgttcaactcccacttacgagtgagaacatgtggtatttggttttctgttccagtgttagtttgctgagaatgatggtttccagcttcatccatagcaaagacttggaaccaactcaaatcaatgagagactggataaaggaaatgtggcaatacacactgtggaatactatgcagccataaaaagaatgagttcgtgtcctttgcaggaagaaggttttaaataaaatagcctcaagttgtttttcctgccatttgctactattatcccagagaactgttctattgggagggtttaccaaggggcagaattaaaagctttgggtaaggacgaagttagaactgaagtctagaacgtgctaccatgttgggagaggatgtgaacctaaggcacatcttcaccacctttacccagcatgtattgttcattcaaaaacagaggaatatattccagacttaaggactattaagttttggggactttataccccatttctttttcttatgaagttgacaatgtttaatagagttgtactgataacagaaaatgacctgattttatatctgacatttttcaaacctagtgtgataaagtgaatcattggtctcaattctccccttcctgttctgcacattcattcctttgttatggtgttatgttgggtagattgtattccctaatcccttgactttgagcccaattatgtgaccttctttggccaatgagatgttagcagataggacataaaccgaggcttgaaatatacttgtgtgttggatttatcttcttgtgctcttgctttttgccacgagaatataccctgggtaactgctggacaaggaaaatatggagacaaaaagagcagatctgggtctggcctataccttggaaccaagtccagctgagcctggattagattaggcaagccagccaacttgcacatgtgttagccggagaatcagtgcttgttattctatgccactgaatttgggagatggtttttattgcagcatgattgtagatagagctgactagtatacaagaagcgtcatattttcaaggctttatggttagtaataaacttaatttacccattgcttaaaattctgcataagaagtttgctttaaaaaagagatggctattagtttatttaagtttaatatttattttttccagattctggctgttggccacttgagatattactgtacattggacacacacaaactgaggtgactcaagggtaagtggtgggatgttggtgagattaagtagggaaggctattatagatttaactcaattaaattcagcaaattatatatatatttcctactgtatgcaaggtgcttttataggtactagagacacatcgatagaaatctctgccttcatagagcttttcttctagtggtcattcactagatatagggatcatctcgttccgtagcagaagagggttcttggcaccaaaccatggattatgagagcaaaagtgacacaaagaatcaggaaaggtcacactcactgagcctttattctctggaaagaactatttactgtgaagagaaaacataaggaatgaatgacagcctgggaaataagtagcaatgagtttcattcaaaatggggaaagaattccatctaccaagagggaaacataaaactgtaaaaatgaagtcaaatcagggggaggaagtggcttttttcttgccaggagtttatctaagggccaagaagagaaagagaaatagatttcaaattttaatgaacaattacagtctcttcctcctaggtaggactgattttctaagccggtcagagattctcctctattgctaactgtacatgcatcctcaaacgtcctctgcttcttccaggttccttttccttgaagagttgttaaggggtcatcggaagtcttggtgatccatctaaactatccactctactgggtagtcctagtgttgattctgaccttgtttggcactcatcccaagatatttgcagaagatgtgaaaaagccaggcagtctactaggtagacgtctgaatatgtggaaaattctaaacagcaatgacttagacaaggtagaaatttatttcttgttcacataaaactttgagcaggctgcccacagtggtgatggtgctctgtggtatcagggtctctggtttcttctaccttgttgctccttccatttgtgacctgggctgctagtcaaagatggcagcatctaccttccaggttgcaggataaagaagaagagaggctgggcgcagaggctcacgcctgttatcccagcactttgggaggctgaggcgggtggattgcttgtgcccaggagtttgagaccagcctaggcaacatggcaaaaccctatttctacaaaaaatataaaaattagctggtgtagtcccagctacttgggaggctgagatgggaggatcacttgagcccaggaggtggaggttgcagtgagccaaaatcacaccactgcactccagcctgggtgacagagtgagactctgtgttaaaaaaaaagagagagagagaaagaacagcaaaagatatattactgctgctcctttaaggaaggggcaatatttccacttatgtcccattggctggattttaaacatattccttctctcagccactaggcaggttgggaaaatacagtctttattctgggtagccgtgtgtccagccaaaacttaggggatctaacacagtggagaaagtggatttgggggatgaattagtaataatagattaggctatgctgtggtccatataaaccctaatatctcagtgtcttgacccaactaaggtttatttctcactcaggaacctcagttgacaggtgcttcaccatccctctgctgattgctggaacatggggccttcaagacagctgttaagaggggaagagaggaggacatgaggcagaacaccaactcctaaatgctgacttctaaatgcttacgactgacatccctcatttctgctcttagtcccttggccagaactagtcccatggtttctacctaactaccagacagcctggaaaatgtggaaaagcattttattattacaagtgggaaataaatgtctctgccacttattggggttaatacttgaattcatttaaagagttgtatacaatgactaattgctacagcatgctgaagttttgattgagcactttgtcagcatttaacattcctctcttcccccacaggcttatttgtggcttggagcctccgtgtccttctagccccgtcaatctgtggttttctctgtgtatccacagtcttgaagaaaagccctgggcactggcgctaggttttcccatttgacacagaggaggcctccctttaaacgacaataaaaatagcctccatttatgttgctgtttctttccctttgtctcttctactaaaggagccaattaaacaaaatgtgtgctttcggcgcctgttctgtattcactttaagatttaatcaaccctctgaacctgcagcataactgcctcataatgtcaagttaatatattgagatcagctcaaacccaccattcccaagggtggttttgtttaaaggcaagttgtaattgaatttctaagcaactgccaagctttcaaggtaccaaaataaacattatccaaacagaaacttatcctggaatctttggttaacttatgtgtactttaagaaaacagaggttttcagaatttaaaaaaaaaaaagtaagctgaactctttgaagtcccttcaaaacttaatcgctattaccttcccccacccccatttcttgaggcactcacagctgaatacccaatcaggtaaatcagcagctgagtattcactaaaacacagctttctttgctttacaggaaactgtccttcaggctcctttgacttttgggctctttcgttgctcagctaaatatcttcagggatcctcactgcccacagaataaagtccaaactttccatcctgggattcaaccttttctgtgatctgtctccaacatgctttgcagggcttatctctacttacagaaccctgtctcccttcacccaagcatgagcctactcatcaatcatatcccacggttcacttcttgcaaatatgtttgacacttttctatctgggtttttgttgatgttagtctcttaacctgtaatgttcttcaccccaaatctatctattaaaatcccacccaaatcagtagcctcttccagttccccacagttgtattaaatgtcaccgttgtgctacgtagcacttggagacacgtttattgttatacttcccttattctgtttgcatctgaataagttccacccagcttccacatgagtttatatgttcctcaaggccaggaagcgtatcttctgtttttcttccctcctttgtttttaatggacctttattaaatacctactgagtgcctggcactgtgcaagagactctgagaattacaaatcaagcacagtttagattctcaagaaacccatagcaaagattggatgcaatgttttttcttttttaaaaaatatttttggccccctcttaggaaaaaaaatttttcctttaaaaaatgtttatttatttatttttatattttggatgcatattgaagagaggggacagaatgaagactaaagaactcgggttagagatagcaataaaatgtataaatgtgcataaagttaaaatatctggacagtgctctgtgtcatcactggtataagataccttaaaagaagggggtattgcttcagattcatttggacattcatagacaaggagaaatgatgtattagggggaagacagcaaggaattgggagtttagtgaaactcaaagggaacaatagatggtttttttgtttgttagttttctttttttgacatggagtttcactcttgtcacccaggctggagtgcaatggcatgacctcagctcaccgcaacctctgcctcccgggtccaagcgattcacctgcctcagcctcctgagtagctgggattacaggcacccgccaccatgccccacgaatttttgtatttttagtagagacgaggtttcaccatgttggccaggctggtttcaaagtcctgacctcaggtgatccacccaccttggccttccaaagtgctgggattacaggtgtgagccaccgcacccggccaatagatggttttcaatataaagcatttgtaaagggaatcattgggtggcagatagtttggaaattaaaaaaaaaaataaaacaaaatcatagaagtcctgaatttccagatgaaagaacttggactttattcaataagcacaggcagccacctacagttgttgagctttggtgtgatgtaacctgtgcttttccagggactgttaatctggtgtgggtgcaggttgatgggggaagctagaggatgtcattaattcaggaagaaaaccgatggtctggactgagggagcagcagcagcagtgggcatggaggggaagagaggaatgagtaaacttggttagaggtagagtcacctgggtttatgaacaaaggagatgtaggatttagagatggtcctgagttttttgatctagattgcaaaaacgatggggctaccatcagcaagaggcacctaagagaaggctcagattgagggcaatttgtgagcataggggccaacaggaaatccaggtggggggctccatagggagtagaaaatgtaagctgggatttgggaaggggtcagggatggatataagtaatatttgaagaaagtaggcttattttcaaatttggggtatgttagcattttactgctggactgtctatgcatttcattattggagtatcttaacacaaacatttgaaaacctcttttctgaaatgcaatacacgtatcataaatttcacccactgaaagtgtacaattgagtgattttcagtatattcacaaggttgtgcaaccatcaatgcaatgtaagcttagaacatattcatcaccccccaaaaaaacttcatgcccattaacagtcactcctcattcccctacaacctctccccagtctaaggcaaccacaaatctttttgtgtttatagatttgcctattctgcacatttcatttaaatagaatcatacattatgcagtattttgtgactggcttctttcacttggcatgttttcaaggatgtacacggttttcaagtatgttttctttcgcttagtgtggattgtacttaattcctatttattgccaaataatgttttattgtatgggtaaactgtatattgtttaatctgttcatcagttaatggacatttggcctgtttctagtttttggatattatgaataatgctgctataatcattcatgaacaaattttggcagggatgtatatttttatttctcttgggtatatacttggagtaaaattgctgggggatatggttactctatgcttagcattttggggaattgtcaaactgtttccacagtggctgcaccattttacattccccccaacagtacaaaagcgttccaatttctccacatctttgccaacacttgttattaccaatctctttgattatagctagcctagtgggcatgaatggtatctcattatagttttaatttttcatttctctaatgactaatgatgttgagcatcttttgtatatacgtattgttcatttgcatatcttctttggagaaatgtctttcaaatctcttaccaatctttcaactgggaagtgtctttcacagtgtacaaatttttaattttaataaaatttagcatatcaattctttttttcaacagattgtgcctttggtgtttatcaaaaagtcatcatcagacatcatctagattttctcctgtgttatcttctaggagttttatagttttgcattttacatttaggtctgtgatcaattctgagttaatttttgtgacaggtataaggtctgtctctagcttcatgtttgtttttttttttttaaatgaatggccagttgtgttagcaccatttgttgaaaacactcttttcttcattgtgttgcctttactcttttgtcaaggattagtttcagtcagattttcttattttaatgtctaagggatctgcagtgatgtttcatctttcatttctgatattataaatttgtgtcctctttgtttgttcttattctaagggctaaagaattttattgatatttaaaaataaacagcttttggtttcattgattttccttattgatgttctgttctcagtttcattgatttctgctttgattttattatttcttttcttttgcctactttgggtttaatttgctgtgtttttcttttttctaaggtggaagcttagattatggatttcagatttttattcttttctaatgtatgtattcagtgctataaattactaactaagcacttcttttaccacatcttacaaattttgataagtggtgttttcattttcattttgttcaaagtacttttaaatttctcttgagacttcttttttgacctatgtgttatttggaagtgtgttgtttaatctttaattgttttgagatttcctagctatccttcttttattgatttctactttaattccatttggtatggaatgaaagcagacatggtatgatttttattctcttaaattcgttaaggggtgttttgtggcccagaatgtggtctatcttggtgaatgttccctatgaatttgagaagaattagtgttttgttgttgttgtctgaagtagtctatagatgtacattatgtctaattgattggtggtagtgtgaattaaacaatgtccttactgatttttttgcctgctggatatgtccatttctactagagaggtgttgaagtcttcaactataaaagtaaatttatctatttctccttgcagctctatcagtttttgcctcacgtattttgatgctctttttttttttttgacagagtctcactctgtcgcccaggctggagtacagtggcatgatctcggctcactgcaagctccgcctcccaggttcacaccattctcctgcctcagcctccctggtagctgggactacaggcacctgccaccacgtccggctagttttttgtatttttagtagagatcgggtttcaccacgttagccaggatggtctcgatcttctgaacttgtgacctgcctgcctcagcctcccaaagtgctgggattacgggtgtgagccaccgcgcctggcctttgatgcccttttgttaggtgcagtgacgttaaggattgttataatttcttagagagttgactcctttatcattttgtaatgtctcttcttcatctctgataactttccttgctctggagtctgctctgtctgaaattaatttagctactcccaccttcttttgattgatgttagcatggtgtatgtttttccatccctttagttttaatctatatgtgtctttatacttaaaaagagtttcttgtacataacttatagttgagtcttgtttttctcactctgataatctctgtcttttaattgatatattcagaccattaatgtttgatgtgattattgatatagttgggttaatatctaccatatttgttactgttttccgtttattgccattattctttgttcctatatttgtcttccactcttttccttctttttgtggttttaattgaacattttataattctgttttctttctttttaaaacaatgtcagacaattgactttgtggacttgggggaaagagtgggaggggggtgagggataaaagtctacaaatagggtgcagtgtatagtgcttgggtgacgggtgcaccaaaatctcacaaatcaccactaaaggacttactcatgtaaccaaacacgaataacctatggaaaaaaaaagaatatgttatacttctttttttaaacttatttcttcttttacatttttaagttgttatcctagagttttccatatacatttacaactaatccaattctctttcaaatgtcatgataccactttatgagaattacaaatactttataacaaaattatcccaattccttcctcccattccttgtgacattgctgtcatttgtttcacttatacataatcaaatccattattactgttattatttagagcaaactgttatctgttcgatcaattaagactaagaaaaataaaagttttgttttgcttttacttatttcctctctaatattcttcctttctttatgtagatccaaatttccgaattatattattgtccttctctttaaagaacttctttaaacatttcttgtaaggcaggtctactgacaatagagtccctccatttttaaattgcttttcaggttttgtatctccatcataaaatcatgaaatttttttttttttttgagacaaagtcttgctgtgtcacccaggctggaatgcagtggcacaatctcagctcactgcaacctctgcctcctgggttcaagcgattctcatgcctcagtcactcgagtagctgggattacaggcatgcgtcaccatgcctggctaatttttgtactttcagtaaagagggggttttgccatatggcccaggctggtcttgaactcctggcctcaaatgatctgcctgccttggcctcccaaagtgctgggattataggcatgagccaccatacctggcctggataaagtctttatttttctttcacttttgaaagataatttcatcaggtacagaattctaggttctttctctcaacgccacctaataaaggtgcctcctgccccccaccccactttggcttcttttagaatttattctttgtctttgattgtctgtagtttgaatatgatatgcctaggtgttttttttttttttttttttttttggcatttatcctgcttggtattctttgagttttctggatctgtggtttgttatctgactttaattttggggaaagttatcaattattcttgttttaaatatttcttctgttcctttcttactcctccttcctatattcccactatgtgtatttacaccttttgtagttgtcacatcgttccattctatttttttttttttttgtattttttctccatgcttttcagtttgggagatttttattgtgctattctcaggctcagagcatctttcctcatctgtatcctgtctactaataagcccatcaaaggcgctctatatctgtcacagtgtttttgatatctagcatttctttattgctttttcttagaattttcatcagtctgttcacattgcccatctgttcttgtatgctgtctacttcactaattagagcccttagaatattaactgtatttgttttagattcccagtctgatcatttcaacatccttgccatactcgagtgtggttctgtctcttcaaactgtgttgtcttttaatatgccttgtaattttctcttgatagctagatgtggtgtggtatatatagggaacttctgtatataggcctttgttaatatggtaagttgtggagaagggaagcattctatagtcctataataggtctcaatctttattgcctgggcctctggacttgacaaatacctctcaattcctctctctccctcttaaatggcacagaattgctagagtaggcttgagctgggcatttttcatcttccatatcaaaggttagagttgctggagttgagtatttctcttcccataagtcagttagggtctaatcaaaccccaaaagattagactctggttaatagtttctcctgagaacacatctaagaagagaatattctggcatgtttaaaaatggttcattttcccctcacctttctgaaagtgggagagaaattttctctaatattcactttgagaatcaggtcaagctattggtcgcaaaagtgtgcccccccccgccaccccactgcttggtgccccctgggattttaaactctcagacttgtccacattaagcaaccagttcaggcatttttatcttggcactggttcctttggtggtttttgcttatggttttctgctctggtaagttgtgattctttgtttttccctgtctgtcttttcaattttgggggaagcaatttgccctgtgacctcacttctgttaaagaagtctaagaaaagttgttgatttttttagtttgtttagtttttaacttattgttaggggagagtggttacttccaagtttcttacaggccagaccagaaattggaagcccataccattgattttggtatattggtcttacattttttcactttgctgaactcatttattagttctaattcatggggtgtgtgtgtgtgtgtgtgtgtgtgtgtgtgtctgtgtgtgtgtgtgtctgtgtgttacttagcattttcaatatacaagaccatctgtatagttttacttttccctgttcaatctggatgtctttatttctttttcttgccaaattgtcctggctagaatttatacaacaatgttgaacagaagttatgaaagtagctgttcgtattctgttcctgatcttcccttagggagaaagcattcagtctttcatctttaaatatgatgttagctgtgagtttcttgtagatgtgacttagtaggttgaggaagtttcctttctatttctagtttgttgagtgttttctttttattatgaaaagtgttgggctttctcaatgctttgtctctgtctataaggataatcatgtggttttgttcttcatcctattaatacaatgttgcattaattgatttttagatgtcaagccaaccttgtcttcctgagatacatttcactctgctatggcttataattctttttatatgttgctggatgtgatttgtttgcattttgttgaggatttttgcatcaatattcataatggatattggtctatagttttcttgtgatgattttggtatcagagtaaaactggccttgtaggatgaatttgaaaatatttcctctgctttagtttttatttttaaaatgtactttattttattattttatagagatgggtctttctctgtcacccaggctggagtacagtggtgtgatcatagatcactgtaacctcaaactctggggctcaagagatcctcctgctcagccacccaaatagctaggatcacaggcatgcaatgctatgcctggctaattacaaaaaaattatttttgtagaggcagggtcttgctatgttgcccaggctggtcttgaactcctgacctcaactgatcttccccaaccttgaatcctttccaatttttatattaattatttcctaaatatttggtagaattcatcactgaagtcatgtgctttgagatttactttgtggaatgttttaaattattaatttaatcacctgaattatcagattttttatttcttaagttgttttttagcagtttgtatctttctaggaaatagctatttcatcaaggttgtggaatttttggatataaacagttgttcctaattttctcttataatctttttcatttctgtgaggtcggttacaatgtgtcctctttcattctgatttttgtaatttgagtttctttctttttgtttttttgtttttttttggtcgatttagctagagatttgccaattttgttctctttcaaggaaccacctttttgttgctttgattttctctgtttttctgtaatctctcccacttattttcactataaacttcattattttttccttctgcttgctttgggttttattttctcttaattttgtgtttcttataatgaaagactaggatatttatttgagatgagttttagtagtggcatttattgctacaaatttttctctgagcactactttacctgcatcttataagttttggtatgtcatagtttcatttttgttcatcttgaagtattttctgattttctttgtgatttcttctttgacccattgtttatttaagagtgtgctgtttaattttcacattagcaaatttcccaaatgttcttctgttatggctttctaatattatttcattatagttagagaacatattttggatgattttaatctttttaactttattgaaaaaaaatttttttttttttgagatagagtctcgctctgtcacccaggctggagtgcagtggcacgatctcggctcactgcaagctctgcctcctgggttcatgccattctcctgcctcagcctcctgagttgctgggactacaggtgcccaccatcatgcctggctaatttttttttgtatttttagtagagatgaggtttcaccatgttagccaggatggtctcgatttcctgacctcgtgatctgcccacctcggcctcccaaagtgctgggattacaggcttgagccaccgtgcctggcctattatttctaataatgcaggtctgctatccatgaactctttcagcttttgtttatctgggaatgtctttcttttacttttgtttttgaaacatatttttgctagatataaaattattagttgacaggttttttttttttccaggagtttcaatatgtcatcttactgccttcttgccttcattgtttctaatgagaaataagctgttaatctcattgaaagtcctttgtatgtgatgaattggttttcttttagtgtttttgagtttttcttttgtatttggttttcaatattttgactatgatgtatctgagtatggatctctctctgtttatcctacatgtagttcattttggatgtgtagattaatgtctttcaccaaatttgggaagtattcagccattatttctctgaacatttttttcttctcttttctttttactctccgtctggtactccattactccccttctggtacttcattactcctgttacacatatgtgggggtacttaatggtgtactacatttttctgagtctctgttcacttttcattctttttcctctcttctccagattgcatagtgtctattgatctaccttcaagttcactgattctttattttgtcagctcaaatctactgttgagtccctctagtgaatttttcattttggccattttcacctctagaatttccatttggttctttaaaaatttctgggccaggcacggtggctcatgcctgtaaccccagcaccttgggaggtggaggtgggtagatcacaaggtcaggagatcgagactctcctggccaacatggtgaaaccccgtctctactaaaaatacaaaaattagccgggcatggtgatgggcacctgtaatcccagctacttgggaggctgaggcaggagaattgcttgaacccaggaggtggaggttgcagtgagctgagatcacgccattgcactccagcctggtgacagagccagactctgttaaaaaaaaaaaattctgattttaattgatgttttctatttaatgagaattttttcaatcataatttccttagttctttaaatatagctttctttagttgtttgaacatgtttataatagctactttgaagtctttgtttgctatgttcatcatctgggttttttaaaaggtaatttctattttttgctgctttcttccctaggtataaggttaaggtcatgctttcctgtttcttggcatagctcataattttttgttgaaaaatgaacattttagaaaatatgttgtagcagctctggatactgatttccttttctccttgccctggggttgatgttaccgttgttgcttgcttggcaatttgtttctttgtttggtaactttgctaagctaactttgttaagtctattttccttgcattgtgcagcctctcatgtttctgttctgatttgcatttcttgtttttattttttagtctggctacctaggaatcacccttgaatccacaggtggtacttattggtcagatgttgtgtttacgttactttagcctgatagatgcttacctcctctcccttttgtgggggctgtgtgttgggggcttagaggttgctattacagtcccgggagtttatgttttggccccacattcagccagggactagcttggaggttccttttccaatcactcctgaaagggcgtagtcctgggcttacatgcatttttccagacttacatgcatttttccagggacctgtgtggatttatttttaagcccagttttctaagagttcccctgggttatagtagcttattgtttagccagtgttttatcagaggttgtgtttaaactccttgtgtgtatgaggcctatgttctttgttgataaatctgtgttttgcgtggggaatgcttacaagtctggcccatctccagtttgattgctcctaagcgtgcatagtgcatgtgcacaatcttcttgatcctcagggattgctatgatcccaagagggttcttctgggctatctttcatgctgtttgtttctgtcaaacttctggacattctgccatttcactgatactgttgctaccataatcatagagataccagcaccctctcgattacccttcaccaacatctccttgttttcaataacacccttaggcatggacttttccacattcagttccaaaaagagtcagtttcgtcagacaatgttgtagagttcttcatccttatgacctatcacttcccctgggaagaatatctgcacaactgcacaggacctggagttggggcagtggactgtttctcccttcctctgcaagcaagtattggaaggagtggtaacctcttctcagcctttctctacaagcatgaaacctctatttgatgaatgagctggggccgagatgattggagcctcagtatgctcagcctgctacatctaggctagggcttccaccatatgataggggttcagtaggcgcaggggtcctcagaccttttatccatacctactcagaatagagcttctgcaacatagggctggaagggcatgagaaacactggagccctgcccctctcaagggtgaaagtgtagccctaggctggaaactgggggaaaacgaagcctctgtcttcatggccgaaataccacagactcttgccatccttgctgaaatttagtagactttcttgaatgagtatttctccatcttgtgtatgcccttagaacaattctagagactataagtgatgttttcaaaacatcatttttgccacttaaattcttgtttttctgtggaaagaatatgccaacctattcactttcatattcttgaggtccccaagatcaagtgtcttattatcatttaatctcaatgcaagaacgaccatgaaatacttgactctttttcttttttgtatccaactgtccaagaaatcctgttagtgctacgttggaaatttgtctagtattcaaccccttctcacctgctccactgctgtcacctggtcagagccactatctcctctcacttgcaagagcctcttccttggtattcttgtttccaccctttctctcctgctttctgttcttgacacagcagccacacagtgatcctataaaagcacaagtcgtaaatccattcctctagacggtccctgatgtagtttggatatttgtccctgcccaaattgaattgtaatccccagtgctggaggtggggtctggtgggaggtgtttgggtcatatggtcagatctttcatggcgtggtgttgtctttgcaatagtgagtgagttctcatgagatctgatcatttaaaagtgtgtggcacctccccaaccccttgctcctgctctagccatgtgatgtgcctgctcccacttcatattctgccatgagtaaaagcttcctgaggcttccccaaaagcagatgctggtcctatgcttcctgtacagcctacggagatgggagccaattaaacctcttttcttataaattacccagtctcaggtatttctttatagcaatgcaagagtagcctgttacagtcccctttttaactggccctgcattacctacctgagctccctaccgttttttttcactccactccagccaatctattcttcattaaacagaccaagcccacctgtaactcagggcttttgcaatgattgtgccctgtgcatgggatacatttctccaattatctacgctgataactcttcactccaagtcattgcttaaggcacccttcctgaagagatctatcctcacccccctttataagtgcaacatgcccccttcctcccagtgctccttatcccaccttcctgctctactttttctcttttccatgatgcttatcaccttcaaaactacgacttgtttattatgatgattgtttcttgtctacctgtccccattggaatatgagctgcatgagggcagaaatgttcgtgtttttggttcactgttgcatctttagcattcagaacaatacctggaacaaagtagatgctcattaaatatttgttgaacaaattaatcattcattcacatcctctgattagttatgtggacagcatgctggatgtaatttgggaaataaataatatagatgaatgaatttcaggccttgggttcagaataatcttgaggcttaattaatgtactcttctgacacctttcagactcttgttggggaaaatgaaaattgctcacttgtgttcccaggaagatacaaaaggcaaaaatgtagtattgcagtctcatgaacatgagtgtgagacttctttatcagactacaaacctcctcttgaccagaagtttgataatttaagtcaatatgttaagaaactaaaagctagaggtctttgtggggtagtgatatggctgtcccacttatgatgggtcccttccttctgcttcacctccagttttgttctgctcctttatttactctgtctcaggtgaggtggaatgatgtagctggctgctaaatttgggaagaataaactgaacctgccaagctcagcaacttgagttttcctctaggagatagcctacttgcaggtgtcagttctcctctgccattttgggccataagtcttaccccatctctctatccagatggggagaactgtcccagtcaacctggaatgggtaaatctgccttctcttgtgattcaattaacaggcctatttcataataaactatgctctccattaatttagcctttataataagaagggtgaaatttaggcccccaaatgccactcctttttcttaattcccaaatcattgagaagtcaggaaggggagaagcgtgcaatggtgaacctcttgagagacctttagtattttgctttcattatattgatgagaacgggtttacctggccacttggctgcaatggaagatgagagagcccttatttggcatttacaccctctatattggaagacagcaggggaggagaggtttgggttggcagctgagttagatgtgcctatcacagaagtcatcaagatttcttgctccttaaaccactggcacaagcatcacctggagctttttagaaatgcagattataggtgctactccagacctattgaatcagagactgctgtttaacaagatccccaggtgagttgtgtgtacattaatgtttcagaggcacttcctagatcagagatctgcaaactacagcctgtgggccaaatccaggctgtgtttgtaaagctttgttggaacacagcatgtttatgtgtttatgaattgtcagtggctgtgtttgcactatgtagtggttaatattgagtgtgaatttgattggactgaaggatgcgaagtattgttcctgggtgtgtctgtgaggatgttgccaaagaagattaacatttgagtcagtggactgggagaggcagacccaccctcaattttgggtgggcaccatctaatcagctgctggagtgaccagaataaaaagcagacagaagaacgtggaaagactagactggctgagtcttctggcctccgtctttctcccgtgctggttgcttactgccctcgaacatcgggctccaagttcttcggctttgggactctgggacctttgaccacagactgaaggccgcactgtcggcttccctacttttgaggtgttgggactcatattggcttccttgctcctcagcttgcagacggcctactgtggaacctcacgccttgtgatcatgtgagtcaatactccttaataaactcccctttatatatacatctatcctgttagttctgtccctctagagaacccttactaatacacactgcaatgacagagttgagtagttgtggcagagaacatatggcctgcaaagcctcaagtatttactatctgaccccttacagaaaaagtctcattgttcatgtcaagttgagagctgaaagtgtggcttggttgacaatgctggggagacacttgagaaagaaaaaggtgtctttttctccagaatgagaaaaatatgagagtattgaggggtaaaaggtaagagctggtacagagggagacgctgatggaaagaaaggcagggtgagtttctggtggcgggtggggcagaatgcagtcaaggatgcaggttagagctagtagcaaggatgggggtaggtggaggttgagtgaggatgaaggtaactgttcaggtgaaaagaggggagttgacagactcctggctgggtgagaatctcccacaatgcttagcacataacctaacataaggtaggcaccagtcaatgtttttgaattgaaaaaggtgatttgaaataagctgtggtttcccattgagtactttgctttcaaactccaggactgtgtacttttgcacaagccctgtggtacaggaaggagctggcctgctttgtcttattcttattctcacttcacagctgggaaatggtggccaagggaggataagtaactatccctgggtcaccaagccaagtggccgtttgcagctggggctagaacccaagactctccgcccaagacctttctccgggaaggctgcatgagaaccgctgagactgggcttaggggattagggaaggacttccctccaggagggcttgccgttagtttatgttggctgcaaggaactccagttatctttgtcaacaaatcaaaacacaaatttgaggattttagaggaggcctctgattttgcgatacctgtgcccaaaagtgaggattgcatttctgtaccagaccgagctcttgttggaatgtgaggtgaagtgggagccagaaggggagagggtgggaattttggccaaatgcctgagcctcagcaggcggtgggggtggggcgggagggccggaggaccagagtggacagaagaagaagatgccagaggcagtctttgtggcctttcttgtttctgggggcttgcccttctccctgctccattctcccaaacatcctctttcttcactgtttccccagctgcctgagccctgctccccagggtctccctgtggcctaggctcctgtgcatgctctcactgccttaattcctgttcccaggccctgtgcaaacttctccgggctgtgttgcagcccctcaggaacatttcctaaaacattcatccatgctgacttttgacagaaccttggaaaccccttatcccatgggcaacagcaacccggatgttcaggggagtcagggttccccagagtaacccttgaccagcagggatcagaaactgaaagcgtagtgctcctacctcctgtcctttgggcggacagtctgggagatttctgcatgtgtgtcagggtcctggtgggagggagtctcattccctcaagatcaacctcaacactaggacacaaatttatgtggcttttctttcttcccaaacccatcctccttcttcccaagtcctgcttcctgggatcccctccaaaataaaccacctgcacccaagcttgttcaggctctgcttttttggttgagttgtattttttagatggacaactctatgcctgtaaatcagaacgtttttgtctcttttcttccaatattcatacgtcttattttttcttattttattcattgcctaggactaatttttgaaaaatatatccctggaagttggcatcttggtcttgttcctgacttttatgtgactaattctaatgttttacctttcagtatgatgcttgcttcaggtttcttgtagaaacttttttcttttttaaattaaggaagcattttcctactattagcttaccacagtttgccagtagttatatgacagtgttttaagccatgcaggcgttgaattttaccaaatgtgttttcattgcatcaactattgccactgtaatattgtgtaatgaccacttctgtacttgtccattctcacattactataaaatagtggagactgggtaatttatcaagaaaagaggcttaattgggtacagaaagcatggcagggtctactaggcttctgtggaggcctcagagaacttacaatcatggtggaaggtgaagtgggagtgagtcacttcacatggccagaccaggagggagagcgatggggaggtaccacacacttgaaaacaaccagaactcatgagaactctatcaggagaacagcattatggggaacagcattagaaaccaagcccatgatccaatcacctcccaccaggccccaccttcaacactggggattacaattcgacatgatatttgggcagggacacagatgcaaaccatatcgcctacattcaggtttgatacaataattatttttctcactcatacttttgtagtgtggctaggtttggctaatctagcttgattctaagtttaggttgaatctagggctgtttcaaatgtctcatcttccttggaccagtggtcgagatggggtgtgatagcagaagtacaagagggaacaagtggaagcaaacgatatcccacgaagccaaggcttggaactggcacactgacactcttagttccaatttccacaggctaaagcaagttccatggctaagcccaacagcagtgaaattgggggaggttactctgcttctgttggaagaaactcaaaggatgtagcaaaaagggtggaaggggtgagaatgaaaaactgggaagaaagcaattgatcacgtgcatctactgagatatctatagatattctctcctactcttagtatattatataattacattaatagatttccaaccgttgaaacatcattgcatgcctggagtaatccctgcttatctgaatcaattattaacattaaatggctggttttaattttctaaaatggttcctgtgattaataggcttccactggtgattgtgggttaaggcagattggactcatttctgtgtggaatctgccaaagtttgtttcatgagagtgggcctctccccttcctctgaggagtcagtagccacctgggcctttgtgtttctctggctctcgtgtgcaatttcctgctttggttcaggtgtagttgccttttcctggtacttggcacagacaggggaaaaggagggtccaaatgctaagtggttctgtctacagtcccctgatatgggttgaactgtgttccccccatgatggttaatattgactgtcaacttgattggattgaaggatgcaaagtattgtttctgggtgtgtctgagggtgtttccagaggagattaacgtttgagtcagtggactggaagaggcagacccactctcactcagtgtaggtgggcaccgtctaatcaaccaccagcatggctagaataaagcaagcagaagaggtgggaaaaacggacttactgagtcttccagccttcatccctctcctgtgctggatgcttcctgccctcaaacatcagactccaacttcttcagcttttggactctgggacttatgccagtggtttgccaggggctcttgggccttcggccacagactgaaggctgcactgttggcttccctacttttgaggttttaggactcaaactggcttccttgcacctcagcttgcagatggcctattgtgggactttaccttgtgatcgtgtgagtcaattctcttaataaactccccttcatatatacctctatcctagcagtcctattccacagagaaccctgattaatacactccctaattcatatgttgaaatcctaaccttcggtaccttggaatatcacctgatttggaaatagggtctttgcagatacaatcaaattatgacgaggtcattagggttggccctaatgcaatatgtctgatgtccttatagaaaggggaaatttggatatagatacacacatggagaataccaagtgaagataaagatgtgggcaatgcttttacaagccaaggagggccaaaggttgctggcaaaacaccagaagccaggggagaaacatggaacagattcttcctcacagccctcagatggaaccaaccctgctgatactttgatcttgaacctctagcttccagaactgagagatgaaaaatttctgtggtttaagcccccccaggttatgctacattgttacagcagcactagcaagcaaattcgccttccctgccaaatatgacccatcccccaaatacgacctgtcccccaaatacgacctgtcccccaaatacgacctgtcccccaaatatgacctgccccccaataactggcaaattcttccggaccctcagaaccctcactcactccttttgtctgttaatctcagcctggcggtccctagaacttctacttctctagcagtttttcccctgcttgtgtttttgatatttcttcccatcttttttctttgtagatttgataccattatcaactttctagtcaatgttttatgcaaatgatgtcagtctcattttccagaatactatagactcattcaaccttgcatacatggtcattttttgcagtttgaggccatctacttccctgaatcaattttggcacagacattataaactccattttatgtatgaaaacaatgatgccagatagggtaagttacttgtctctgattatgcagtcatgggacaggagacacctcaattcttaaaaattttgtataaatttatgaggatacagtgcaattttgttgcaggcatagattgcatagtggtcaagtcagggcgcttagggtatccatcacctgaaaaacacccgttaggtaatttctcaatatctcttcccttaacccctcacccttccaagtctccatttgctatcattccactctgtctgtccatgcatacacatttgttttttagtactcacttatgagtcagaacatgtgatatgtgactttctggttctggcttattttacttaagataatgacatccagttttcatccatgttgctggaaaatatataatttcatttttttttaaaatttttgagacagggtcttgttctgtcacccaggatggaatgcagtgttgtgactttgactcactgcagcctcaaccccctgggctcaattgatcctcccacgtcagcctctcaagtagctgggactacaggtgcataccatcatatctgggtaattttgtagagattaggtctcactatgtttcccaggctggtcttgaactcctgggttcaagtgatcctcccaccttggcctcccagagtgctgggattacagtgtgagccactctgcctggtcaatttcagtctctttttatggctgaatagtattgcattgtgtatatataccacattatctttattcaatcatccattgatagacacttaggtcagacacctgaattcttaagacaatgtgtgtttcacagcaggagtggcaggaagattttgtctggcatgatattctagcagatgagcagagtctgcttaaagcactgtactgagaagggttctgaggcctcatccacggtcagtgctgtcatcaattacagatgtctgccacaggcaagggagggagaagtggcaggggtctacttggtctacactaggttttgctattattcctcagaattttggctcatgctcttgagacgtcatggtgcttgcagactatgtggaaggagtctgtgggaataagatcagtcactgtggctggctgtgctttaataattagctttccttttaggcccaatcaagatttgcattttaacataaacttacaagtagcgagagaacttagtcctcacctatctataatccctccccatcttcttcacttctcttctttccagtttttccaacagattttcaggcaacaccatagcagaccaatactgtctactgggtgggatttggggccataaaactgtctactgggtgtgatttggggccataacacttttaattggcttgaagatctcttgagggatgggaagaaggatgggtttcaaagtgagactactcagggctcaaattccagccttgccaatgacttgctgggtgaacttgaactgctatctttgatcccagttgttttctatacatgggggtaaccattcctatttgtagacttgcagtgataactaaacaacatgatggggacaaagaacatgaggtagggtattcattcatttgtgcattcattcattaattcagaacagtttgcagagggtctgctatgtgttaggctctgggagtccaaaggtaaataacacatgacttcccatgatgttctcaaagcctggtgggggacacaaacaccccaccacaaattcctttcttttttttttttgagatggagtctcactctgtcgcccaggctggagtgcagtggcatgatctcggctcactgcaatctccgccacccggattcaccccattctcctgcctcagcctcccgagtagctgggactacaggtgcctgccaccacgcccggctaattttttgtatttttagtggagacggggtttcactgtctcagccaggatggtcttgatctcctgacctcgtgatctgccctcctcggcctcccaaagtggtgggattacaggcgtgagccactgcgcccggcccaccccaccacaaattctaagagtcatgtgtcaaggtcgtgggcaaaggggtgcacatgatgcttccccacatggggaaaggggtggtcatggggaacttccctaaagagaaatctccaaagctaaaatttgaaagacaaaggagatgctttcaggaggtgacaggagaggagtagtcaccaaagctgcaacagaagttttctcttcactatgtagcaatggtgtctcatgggcaatgctaatcttctgctctgcataatttctggggactcagaatttcaggcatcccggagggatcctctgagacataacccttctcttaagaaatgatgttatcctcaagatgcgataaagcaacagcatattaacagttgacagaactactccttcctcagccccaggactctgggtggttggtcccgtggtggctgtttctggggaaggaggaggcaggaagagcagggggcagagcccagctcagggaagatggaaaggcacagcatggttctccttgaagaagtctgtggttacccatttatatttagccagtaaaatgaaatgtgcctgcggaggctgggtgtaaattgttatttattgctttgtgagaaaactcccacatggggttctctggcaagggaagctttgcaaaatatttttggcagaagcaaggtatggctttgatttccactttgcctctaatgtttgtcaacgtgtcaccgttgagagggaaaacaaaatcggagcatgcatttttggccaagtttgtttattagttagcatatatttattgagcaatcactgtatgctaggtgctggggatatagcggtaataaaggcagatgtggttcctgtccttacagatgagataagacagatgataaacaattttaataacatttgggggtaagggcccaagaatcatccattctctcatttggactctcaagatggggggcaatgaaacaaatgaaatccaaagtattcgcattatcaatggctaggaaagacccaataggccaccaaattcagaactctctggtatcaggcaaattaaagaagttggatgaaatttgaggtcaaagtagagccttctctcttcccaaatctagaccttggaacttacctagaaagagaaaaacaaagaaacaagtactgttacccagccagcctcaggcctgtggccaacaaactggagagagaaagactgtgaaagacaggcctgttccttacaatgactctgccctcttttaacaaagtgtgtcttcaataacattctaaacatcctaaacttttattggatgttgcttgtagaaatggttctctgctacaccatttgcaatgtaacttggcacttcatccttcaagacatagaatctcttttccctgcccttgaatctgggctggcctggattgctttggctaattgaatgcagtgaaagggatggcatgccaggcccagcctaagcctcaagaagccttatgagcctgcagtctcacttttggaagcttgccaccaccctatgaacaagccaggacagatagctggagaatgagagaacagagaatggggccaggccccaggcaggtgagaaagcccagccaagatcagcaaagccattcccagcccacagtggatggcaaatgcatgatcagctgacctagctccgatcagcagaaccacctagctagcccagagagtggtaagcagtaataaatggttgttttaagctactaagattttgttttgaagactctatttttttagagcagttttaggttcaaagcaaaattaagcagaaggtacagagatttcccctatgtctcctgcccctcccccattatccacatagcttcctccattatccacatcccctaccagagtggtacatttgttacaatagataaacctacatcaatacatcatgatcacccaaagtccatggttcacgttcgggttcactcttggtgttgtacactctgggtttggacaaatgtataatgagatgcattcatcattatagtatcatgcagagtattttcagtgtcctctatatcctgagtttgtcagtttggaagctgaatttacccagagcttaacatcacagaaagcaagtcatagtttgagagtatatggacaatgatcttagctccaattctggccacggcatcttatcaacatcagcactcaaagttaccactgtccatatgaggaccaccacatctgataagaatcagcagcatagggctgcctaatccatacaacctataggcaaatggttgaggtagcagggccagcatatacatgaatcagttctagaaccaacaactttgggttcactgattttcatagagcaagggtggggacagaaacatccctaggggaaccaatcccagagagaaagcttcccactagattagtataaacctggaggtttcatagtttcgtggcatttgcttccacttcagtggtgactgctgtccctctgctctctgaacatgtgaaagtcgagttgtgggctgcagattctggacttcactccagtgagagtcctgggaagaattcagtctatgatgcctaggttgctgccaggaagtgatcgagtgtccacactctcaaggtaactattggatcatcacagaggctgaagtacagtggtctcctatccctaccccaaagaaatgttttggcgagggaggtacggttgggggcggggatgggatggatattgataagcatgtttagcctagatagattacacaattttgtactgtgtaatcctcttatgtagagtaattccataatgaatgcaagttgtttaaaaaggcttctgcttgtcagttttcaattatggtcaaagccaggaaggctgaaagccaagctgtttcactggaaatcttcaaatgcccatagctttgacacaaaacaaatgtctggagcctctagggtacattgattgactaatcccaaactccacagctaattaggaaaaaaagataatgacactgttgttctaaatcaggccagtctctctggtcacaagggctcatctattcttactctgacagttcaggtccttccttttggttcctgcttctcccctgtgccctgtgctgctggaggggcttgtcaccctgaaacataatttcaagctggctaatcagaacattgaccgtgtaacccagccaatcagaccttttctggggttgatgtagtttgtgggagacaaagggcctctcacttctctgagatgctctgtaaattacgacctccaaaggagctcctagactcatctttgccagaaagagtgcatgaaaagaaattcaccccaaagagaaacagggcagaaagatggggagaaaggagcagatactggaatctccttgaaacctggatctagctagactggaattcagacgtacctctggacttttgagttccattaattcataagttgcattttccttgatgtggctttagttgggttcccctcccttataaatgactgtgcatagaggacagagaaaagccaagacctttggtatctttgtgaagaaaggccagaactccccaaccatcagggccctgtaggaaaataagttttgcaggaatagctatgggagccagcaaagggtactactaaaatgctcgcttcggctgctctcagtgcctgaagtctctgtcagaagagcttggccttggaggcagcatcattttttgttaaactatcaaagcctctggaagaggtagtgcaaaagtgaaggagaggcatccttgagaaaaaatgttaccatggtgaaggaaaatggttttctttcaccaggttagcatgaagtaactcctagcagactgtggctcctatggcatcattctaactcctgggaaaaatactcttgacatcatgatcccaacattcagtctgaatgagtgagtcttttgaaggcatttccagggtattggcaggttattggggtgtcttgtgggtgccccttaagtaatattgcatttgtggcatctactccacttacaccaagggctggtcctcgcctgttgatggtcattccaggtgtaaccatccagatcagagctgctaattgaggaacacccttcctctctccctcaagggcgagcgtgtgacttttacttgagtgaaatcttctgttggggtccaattgaacctgcagattgttcctgactgagtcttgactattaagagactatactatgtgggaaagtacaccatttagaagcagggaataactttctggaggaatgtcacaaaagaccctctctacctccccaggagcaaatccttcgcctacagttctttttcattctacacttctcccgtgcaatgagaccataattaaaacactgtgagaaagaattagaaatactgcttctgaactttaattataaactccatactcaggttccttggggcttacacaggcagtccacagtcttatttgttctctagaacttggaatccatttctctactaaatcattgttggcaacatgcccagcccaggccagtccactatggctcatgttagccatggttacctgaattatagtgttaacagtcctcaaccagggttatctggttgcaagcaacagaaaacaattgtgacaaaagttagcaagaaaaagaaatatgttgggaagacattgggtagtgtgtcagttagggttcaatgaagggagaaagttgtaatgattattatggaataagagatgtagtaggaatttgacctcacaaagttgtaggaggagctaaggaagagaggttcagcaagaggagtaagaggttcagagaaaagtcattaaccaggcctcttgaagcactgatgtgggtggacacgttgaagcttacaggatcatcagggagccagttacagctagtgctagatgggaaccatgaagaggagctggggaagaagtctaaggaggattactgccactaactagtcacaaagtcagtgactttgtctggaggtggacttgctgttggtctacagacctggcagtcaggggaaacctaacctaagcagagtagagagatgagcctgaacctgctggcagttcagcacgtatctcttgctgctgttacccgaaaggaactgcggaaaataacggatgctgagtcacttccgcttttcagatctagtacaaattctttttaatccattttaacctgaaaacatatagggaaggttgcagaatcagaggaaaaacgatgtggccaagcccatgacagatgggtctcagtagcaggaacttggggttagctccaggcatgattcagttccagccactttctgtcatgtgtgtcagattccacgttcaaattccatgttcctgggagggtggctgcagtcaatctagcctgagcagaaccaactcttttgttcagagtagagttctgtgatttgcagcccactggaactatctgggagagggagaggggctccctcaaagaatatatgcttgctggatcaaaagagatggagtccattcttagctctttccaccattgtttcagagagagaaaactcattggcatttccagatttcttataattcagctcctgcaatgtagacacttacgatttctctccccttcttctgaagccaaagtcatagtgtatcactggatggcagattttttttttttttgaaacagactcttgctctgtcacccaggctagagtgcaatggtgcaatctcagctcactgcaacctctgcctcctgggttcaaatgattcttctgcctcagcctcccaagtagctgggattacaggcatgcaccaccatgcctggctaatttttgtattttagtagagacagggttttgctgtgttggccaggctggtctcaaactcctgacctcaggtgatctgtccgccttggcctctcaaagtgctgggattacaggcgtgagccaccacacccggcctggatggcagattgaggaattaaaatgattttgataggctggacaaatggacaaaattgaatggaggtaattatatgctacagaaatcaactgtgcaaaatagttcacatggaaaatatcttaggaggtttggtgttgggagggtcaattgagtcaacaggagaatgaggcctttagaagtttaatgcctttcagagccctgttatgaaaagctggtatccagaaccagactgtaggcaactcccttgcagtgcatgagtcaggcagggccccttgcagaagggcaggatttgggtttctgttgggcctggagctaggagccagccttgccataggcctaggaccatgggctggatattccagtacgcttgtgtgtttcttgactgcaaaacaactggctggacctgtattgctctgatgttctgtgattctgtgagcccttggtgttcacctttagggccgcatggttgagaaggggaatcaaaacagggaaacagtaaggagagagaactagaaaatgtgtcccatatttaggaactggggcagggagggcttggggagggccaaccctctaaaacatgaaaggatttcctatggactaaagagaacacttattctaattcttgcacaagtggacatgggctttcagtttaacatatccaagaatgttctaagaggtggccctgattgtgaagttgtaagatcttcatctctgggggctttcaaacaaaggctcagtgaccccccctcaggaatgcccttggaggggctcgtatcaggtggcctcagatatacatctttcttaggaggtcattcagccctgaatatgtcagctaatggcaaatggcccagactgcataggcattgtgaagtatcctgaagatatggaaaacaaggttcctgtgccttgggaagtcaatgaggggaacacatataccccctttttatttgacaagagttttctgtcctgactgacagccactttccagggcaggaacggtgcctccccactgctcaggcctgggacactatagtcctttattcagttcattattttgttgtttgaaggagtttcctagaaacatacttcctctttcccagctctctggtcaatatgagaacatgatgacttcttagaaacaagaagacattatgccttttctctggcctgcccacagttttgattttttgaaagaaggcttaaaatatttttgaagatatatatagagcccagtctttctggaagaagccactggtagtagcaagcttcccacaagaaatgctccctgaccttagttgttttgttgataggtctcagctgggccaccatctccctgtccagtgaaagttgctgatgagctgcagcattccagaacagaatgtgatgctgtctgcttccgcctgccccctttttcaattgtctggaatcaaacatgtgagattctagccaaggaagggcagaaggaggagtagagagagagagagagtgcaagatgagtccattaaagagatggtcccaatcatctagttgtaagcaatttccaactcccctaatcaggggctcttcaaaatgtggtccatggaccagcaatcctccttgacaaatctgttagagatgcaaatcataggccctaccccattcctgcagaatcacaggagatctgtaatttttgtgttcaaaagccctccaggtgatttttgtgcatgcttaaagttgagaagcactggaaaaccacactttggaagttaagtattttaagcagaataggtggctggtgattatacagagaatttaggggagcaaataaatatgccctcccctcccaagagaagtcacccactcccctggcatctgctatctatgcctaaaatccctccattagagcaaagctttgggttgtattgggttcagcaaatgatatcccaaagtgaaggcttcaaatgcagcctcaaaagcaaagtttctttctgatcttctgccctcctgtctctcacccctcattctccagccccctcagccctcaaggaaagccacagaaaccagaccctctcttccccatggcaggtcataggacttgaatagatatttcttaaaagaagacatacaaaagatcaacaggtttgtgattattaatttacatcattaatgaccagagtaatacaaattaaaatcacaatgagatatcacctcatacttgttagaatgtgaggtttattatcaacaagatgaaagataaaagtattggtaatgatgtggagaaaagggaacacttgcacactcttggtgggaataaaaattattatggccgttatgaagaacagtatggtgattcctcaaaaaaaaaaaaaaacctaaaaatagaattaccatagaatccagtaatcccacatctggatatagatccaaaagaaatgaaatcagtatgtcaaagggatctctgaactgctatgttcactgcagcccgaaagcccatgtccacctgtgtaagaattagaataagcgttctcttcagtccataaggaaatcctttcatgttttagagcgctggctctcccaagccttcccttcccaagttcttaaatatgggacacattttctagtagccaggatatggaatcatcctaagtgtccagcagtgtataagtggataaaaatatggtatatattcacagtggaatactattcagcctttataaagaaggaaattctgtcatttgcaacaacacagatgaacgtgaaggacattatgctaagtgaaagaagccaggcacagaagacaaataccacatgatcttacttatatgtggaccttatacaaagttggacttacagaagtaaagagaagaatggtgattagcagaggctgaagtgtgtgtgtggaggtgtatggggaaatggaagacattagtcaaaggtacaaagtttcagttagacaggagaagtttcaagatctgttgcatagcatggtgactgtattaacaataatgtattgtacatttcagagttgctaaaggaatagatgttaaacattctcactagataaaatgataagtatctgaggtgatggatatgttaattagcttgatatactcattccaccatgtatatatatcaaaacattacctcatatcccataaatatatataattatttgtcaattaaaaatacatttttaaagtgcagaaaaaaaaaaaccacaacaacccagaatcccttttccccaaagccagccataaaacctgaaaatgtcactttaacctttccacacctttctgtgtaagaactggccataaagaaattctctgatttgccttgtttgattgtaggtcataagaccctcattccagagagggtcctgccccatccccaggaggaaagaatgctatgcagagaggccaagaagaatctgaacaggcaggccttgctggtttttcccactcagtctggaagcattagaccacaccctttttgttcaatctacacagctggcctgtccattcttcattgaacctaagcataaaaatgaatagcttcccctgtatctctgggtctttattctgaaggttcttgtgtcatgtaaaattatgatcaaataaatttgttatgattttctcttgttatcccatctttgtgataggggtgttggctgtgacccttacgatggggaggaaagggatcatgccctttctgcccttacagttgccattctgtctctgataaaatgcaaccattataactatctcagtatgccgtctacctccaaccttttcttactcctttccctctttccttttgaagagagtgctcaaaagatataatgaaagcagcagaggttccagaaatgggggtgggtgtaaccatggtggaggtgggggctattttaggacttgaaatgctcaaatcccaaagtactagccctaagtgacaactgatgttggcttactggtcacatatcagggtgtgggactgacccattgtcttacacctggctctgccacatagttccagcatctgtctggaccacagaggtgctggaatctgtgactctgcattcattgttaaagtcatgtattttttaatagtcataaaattagcttttaacagctcattgtgtcttcttgtaagtaaggagaaacttactcctttatacttaggttgccctaagtgttttaggagtatgccgggaaacacacaagtgtcttgtgtgcctaatgatttaaaaataaaactatcatggccgggcatgctgcctcatgcctgtaatcccagcactttgggaagccgaagtgggtggatcatgaggtcaggagttcgagatcagcctggccaagatggtgaaaccccgtctctactaaaaataaaaaaaattagcctgacatggtggcgggcacctgtaatcccatttactcaggaggctgaggcaggagaattgcttgaacccaggaggtggaggttgcagtgagttgagatcgcaccactgtgctccagcctgggtgacagagtgagactccgtctcaaagtaaataaataaaaaaaattaaataaataaaactaaaactaccctggagattgggaacgcactccccacagcctcctggagccaagctccttggagctgctctttgcagcagggtgggacctgtgagctgggctctgagatcagctctccttgcccacctgccatggtccaggtgtagccattgtccccaggccccaattaacacccagcatgacactggcactcaacaatggtaatttctagggttgtgatcatttttccctacatggcaaaaactgaatagaaaatgactgtcctccgagggagaactgagaagctttgtgtttcaagggctctctgtgaagaagattgggttgtttgttacactgagggaagtacaaactgtttaaaaaggtgtgaactgagctggtctaaaataatacagctgggtcaggtgtttcaaactcaaaactgggcaatggaaattaggccttaaagattctcttcgtttcgcccactctctgtgttcctggctaatgtctctctggtttccctttgatcaaaatgacaattataaggcagtttgggagatcattctgtaatgttgctacaaacccactttaaagcttcgttcagaaacttgcagtctaaaccgtgcttagactgttctggggtgaaatgcttcaggttctttgagaaaatagtttctggaaatatagcataggaagcggtatgtgaaaggcaggcgtgctggagttttgcccagggctgtctcagctgtgggtgggtgggaagaggaggaagacagaagtatgtgtctacttacggatgtgtatttaagtcaagtcatgacaggaggaagcttatgttctaacccctgatttatttggaggcagccacataaagcagccttcattgaatggaagagtggtttccaaatgtccttaggcttgctggagacctgcagcttccctcccagaggcaatactgagcactctgcctcctgcaaagaagcccccaagacacacagctgccttgggcagtaggagggtaggagaaccctgaagatctgtttcagaagctgctcaaatgggttatcaggcttgcccctgcactctctgttctcagtcatattcggaaaaggcagaaggaccactgggctattgttcccagttctctggggacatccaaaatattccaaattgtgtgagatgcctttaagatggctttcaagcactgattccatctttttcatcaacctcctgggctcaagtgatcctcccacctcagcctcccaagtagctgggactacaggcatgcaccaccacacctggctaacttaaattttttttctttttgtagagatagggtcttactttgttgcccaagctggtctcaaactcctgggctcaagcgatcttcctgcctcggcctccctgagtgttgggattacaggcatgagccacgcccagaccatcatcaacatttatttctatttgaaactcagttttgacaatggctaaaagaatttcctacttctttttttattttttagatagattctcactctgtcgcccaggctggagtgcagtggcacaatctcggctcactgcaacctccgcctcctgggttcaagagattctcctgcctcagcctcctgagtaggtgggactccaggtgcatgccaccatgcctggctaatttttgtatttttagtagagacggggtttcgccatgttggttaggctggtctcgaactcctgacctcgtgatccacccatcttggcctcccaaagtgctaggattataggcgtgagccaccatgcccgggtgaatttcctacttctttaggtcaaaactaaacaattgacctaaagaagtaggacattacttcttaaagcaattcttaaagaactactgtgtaattcactacccagtatattactgtaactgacttgtattaaagaaacaattatatccaaatagtacaaaatgagaaaatgttgtataacttctttttcaaataactgaaatattttcatttttaaatgtgagtgtaggtgccagttgtctttccttgtgaaggactgttcatgctaaggttagagccttcctaattttttgtttcttttattaaatgatagcaacaggagataacaggcattttatcatcttttatcacctaatctcccaaatgtcttttaaacttttacaagtatggaattaaaaaacaatggaaaaatagccaggcatggtggctcacgcctgtaatcccagcactttgggaggccgaggtgggcggatcacttgagggcaggagtttgagaccagcctgaccaacatggaaaccccatctctactaaaaatacgaaaattagctgggcatggtggtgtgtgcctatagtcccagctacttgggaggctgaggcaggaggaggttgcagtgagccgagattgtgccactgcactccagcctgggtgaagaacgagaccctgactcaatttgaaaaataaataaataatggaaaaatagaggagataaaagtggcagtagcagaggggtacaaaagaatagaaaggctttggaaaaagccagaaaaaaggcctacaccaccacttgtgagctgaagagtttcagtgccaagagtgatggggttttgttctggaagatctaaagagaaaagaggataaacaattagaaattttgtcattatgaccaaatgaaaaattttaccttacttttggttttctttaaaatgttgttgtttatacatgtcctattttgaaatatttctaaaggtacccatttaaagagtacttactgtgacagatactaagctgagaagtgatcactttggtatctagataaaaggtgtatgttgcaggggaccctcagaatacttgaattaattgtacttgatagcattatgtggtcttccaactggagcatccaacagaatccctggaaggcttgtcaaagcacagattccggggcctcgcagtttgctgattcagattgctgggtccgaggtgggccccagaaactgcttttctaacaaatttgcagatgatctgatactcttgccctgcctgggagccacactttgggaaccactgctttagggaactatttctataggacgagaaactcacaagttctgaatctctgcataaagcaataaagggatgatgaatataaagaaaattcattgattatttttgaaacctgtgggaatgcatattctgtctccagtactttttccttacttttagcttcttatatttccagacccttcgatgtttttcaggtgttcagtatacagcctaggcagtgatcctcaactagatttagactttgcacatttataaacactcagaatgtcactcatcatttaacttttcttatcatagcttttttgtgtgtgcaaaagcccttacatttttttttcttttttttttgagacagggttttgttctgtcacccagactggagagcaatggcaagatcatggctcactgcagcctcagctacccaggctcaggttatctttccaccttaccctctttccatttatttatttcaataggtttttggggaacaggtggcatttggttacatgaataagttctttagtagtggtttctgagatttttatcctcccgccttggtttcttgaatagctgggaccacaggtgcacaccaccgtgcccacaaaaatattctcccaccgtattagtttttctagggctgctataataaactgggtggcttaaacaatagaatttcattctttcatagttctagaagctagaagtcaaggtgttggtggggacttgctctctctgaagattttaggggagactcagttccaagccctcctcttgggttccgatgttgtgagcaatctgagtgttttttgttgtagacgcatcacttcagtctttgcctccggtgccatggtgtgccctcctcatgtgtctgtgtctttctctctgtttttactcttataaggacacctgttctattggggtagggctcattctaatcaagttagacctcgttttggcttaattatatctgcaaagatcttatttccaaataaagtcacattcacaagaaccaaggcttaggaattcaacctatcattttagcaggcagaattcagtcaacaccacctgcattttcttctattagttttgtcctttttcctttcatttttacatctgtcatccaactaaatttcacccttgtgtaaggcatgggatttactttctttatatagtgagacagatttcctgatattgtctactcaagtgttaactggatcaacagcatgggccatcacttgggaacttgcaaattcttgcattccaccccattcctgccaaattataaattctcaggatggggcccagcaactgcatttaacaccccacgaccccgcccctgcccccaccccactaggaaagactggttcacctgcagtttgagaaccactgcactaaagaattcatttttctccactgatttctgatgctatctttatcacgttttaagtttccatatatagatgcatttggttttgaacttcatttctgatctgttgattattttgtctggtcttagaccagtactttgcagttattgttgttgttcttaatactaaactttaacctgtcttaatattggtaaaataagtcctttcgcttttcttctttaaaattgacttagcttttcgtgagcgtttatttttctatataaattcaagaatgattttatcaagatcttcaaaaaatctctgcaggaattaaaaaaaaagcgaccaaacttataaattaattatctctttaatattatggcttccaaatagtgaatattaccttctcagtttatgaaatattcttttatatttttaatacagttacaataatttgtgcacaaagatctcatgcgctcttttcattaggttaaatcttaggtatagtacagtgtctcttggtagtttcaatggtattgtgcttctgaaacgtgattgtaggacctcgttggattttgctggtgtagaggaactcactggtatttgtaagctgaaacttagaaagttgtgtccagtaactttcctgagctctagtttgttgaatattttaggtttccatatcatctgtaaacaatgaaaattttgtcttgtatcttccaatccttacactttgattccttttcctttgttattgtggaagcctgcagctccagtactgtgttgaaagcagtagtaatagtagccatccctgtctttttctcactctaaagggagtgcatgtaaattttctccactaattgtgatgtggctttttggaagatgttctttataaactgaacaaagttaacacatcccaaattggaagaaatgattactctgttgttttcttgcacctagcattgctagtgatatcaatctgataatttttcttacgtggatgggctgccattgctctctagaaggttttatgttactccctttgtctctggggtttttaaatttgacaataatgcttctaagtgtttattattattattatatcttctattttgcactctatgatccctttcaacctgaaagggatctttaattctgggaacttcttgatcattattttttaacaatcacatttctttatttttctctctctttctagaactcattctacacctctatgtgctatatttcttacctttttatgtgtatttttacattgctcccgactctccatgtgttttgacttgttcttcatcctgaccttggagcacattaatccattacaccattgttttcattctgctgttcaacccattattgagttctttatttcagttattacatttttttcatacttggcatttctactgattcttcttttagatttatagttgcagtactttggtttgctttgctttttatgggttgtttagtgtgtattctcttatagaggtagtagcagtcctcagctagcatggtatttttctttgtgggcatataatcctcactgagggttcctaaccttgtctgtacatcgaaatcacatgggagttttaaaaaaatactgatacctggatcccatcctcatacatttgatttaattgttctgagtgtgacttggacatccaggttttttttaaaaaaaatctctccaggtgattcttttctgcagctaagattaagaaacacttcagcttccagtatcagctggtttggctactaaagtgttcatggagaaaggggctaaagtccaagccctgggagtgaagtgagagggagttagaagtgggaacctccttcagagtagagagccactggggctactatctatctgaaatgagatttttctgtttgccaccaactcagctacctccctccatgtcattcacaagaacttaccttttccaagaatgttatgtgtagatcacagtcattctacctttggggcatggtggagtttggaaacgagggtgaacagggctggtaaagggtatcttcccgaaaaaatgaccccttctatgtttatgctggttgtagtctgttctctccttcagccaggcttgaatggtgctataataatacttcctggtacccacactgggctgtttctgacatttttcttccttacggaaaatggagcagataatggtttatctagaacgttgtgggaaaaggcaagaacatagctttaaaaactccattctcagcctgttttcccatctatggtgccaggccctttttggctttcttctaatacctgtgtctccccagttaataatttctcactacccccaatttcctctcatttgtggcaattccaccgttggtttgggggaaggatccagtctccccagctactcgggctggaggaaattgtcctgtgctgtgaagtatggtagaacatttttattcacttggaaaaatgtgaaattggatctttacctcatatcatatgcaaaattcaactccaggtgaataaagaacttaactgtcaaacccaaaaatgtttaagtcttagtagaaaatctagtaaatatatttaagtccttggtaaggaaagattcttaaataagatacaaaaagaatctattataaaattgataaattctataatactaaaaataagaatgtttgctcactaaaagatgttttcaagaaactgaaagccaagacacaaactggaagcggatatttgcaatgcacattatatggtgaaggaccgttatcaaaaatatataaagaacttctgcagatcaggaagaagagcataaattcaacagaaaggtattaaagagataggaacaggcatgcatggagaggactcaaatgaacccaacaagtatatgacgagttgcttagccttgtgatgactctacgagagccacaaggccaaaatgaggcattatttaattggtaataattacaaagtctgatggtataaaatatcagaatggatatagctccacagatggtgagagtgtaaattaatgtaaccaatttggaatatactttggcattaccttcaaaagtttaaaattcacacaccctttgaatgagctattctactcctagtcactgccaataggaaacattatgtctgtacagaagaaagtacaaataagaatgtaacattgttcatagaaacaagagcctagaaacaacacaaatgcccacaattgggaattagatgaataaactggagcatattcacacaatgaaatatacagctgtcaacataaaggtagtatggctacaatttgatgaatcttggaaatattaagtgaaaaaagttaactctcaaaagattacacagagtttagaaagataaaagtactaaatatatagttgtcaagaacctttgctccgtgaaaacccatgtaaagaggataaaaaaagaagttagagactgggagaaaaatacttgcaaatcacctgtccaacaaagaactagtacagcattaagaattttaaaaatttttcaaaacttaacagtaaaaaaaattcaattaggtgggcaacagaagtaaagaaattcaccaaagagtatatacagatggcaaataagcatatgaaaagatgtttaacattagctacaagggaaaagcaaattaaaatcacaataaggtatgattacaaacctctcagaatggctaaaattaaaaataccaacactaccaaattctggaaaggaggcagggaaagtagagcactcatatattgctggtgggaatgtagaatgtttagccacataggaaaactgtgtggcaatttcttaaagaattaaacatgccattaccatacaacccagcaattgtattcttgggaatgtatcccagagaatgaaaacttatgtttacacagcaatcagcccagatgtttttcaacaggtgaatagttaacaaatgacctagttttgcactcacatctttgtcttaaatgcttcttctaggggtacctaaactaagacaatgtgaagaaaactagcaagaggaaaattaaaactcaggaaagcagatgtaacagatgtctgagaaaacaaacaattcagtttacaaaatgatctgcaaaataccacatctctacaacactcaaattaaaattaacagatagatttaacaagatgttgtagctttaatgtacataacagcaagttgctacttgaatggaacaatcaaggaacaacgacaacaacaaaataatttctggaagttaaatttgtgatttgcaaaataaaaacaaatatttaatagttgaacttgaagataagatcgggaagtttcccagaataaagacaaaaaagacatattgactcaccctctgataaaaagaatggctaagccccagagagaatcaatcagttccggagttttgttgcattattcacatttgctttcttctgttgtcatgatttttgtggttctttcctcttaagcaacaaatcctttagaaccgtgcctcttagtgtctaaacataacgagcttctttcttgttttgaatgatttgtttttgtttatcattattttaattgtattttgatcagataaatttatgtatctgctactcactctttagaattggttgagatttctgagcctgtggacaatgaatgcttcttgagtgcctgttcttagcatgattaaatggaaggtatatgcactaaggttggatgctgcattctgtatacccacttaccaagtgctataattgtgtggatcacttttctaaatccctacaatatttttgtctgcttgatcaattagtttttgagagcaaggtgtttataagtaccatctctggatgtggatttgtcaatttttgcattgaaattttgccaatttttttctttatttttcaagtcagtgtcatttggtgtttgcatttgtatgactattatactttttaggtatatcctttaaatagcatatattaatagcatgattttgcttgttaaaattcagtctgggacttgtacttctgggaagatggagaatatatgttttttttctgtaattcccactaactaaaatctctgaacattatatataaaacaaacatgaggctttgaaaagtagtgagaaggaggcagattggctagggagctcaggacctggggaaaaacatggtaatgagtttcctttgttttcattttgccctgtatatcccgggctacacactgaagaagctaacacctggaaataccaacaaacagataaataaagcctccaggaaggcttactctacccagccaaagcccaggaaagaggcagcctagaaagacagaaaacttttaggcagcagcagtcctactcctgcccaaaccacaggaaaaacaaactaacaaaaaatctgcatcccgttcctaccactgccagaaaggttccagtggggagcctacacttccaccctcccagggctgttgtgagatgctccagccattttggtgttatcatgtttcacgagataccatatggatgttaacagctcctctcctctacgttgtcagtggatatcatgcggaaagccacttgtacctggcaatatcaaagcatctctgtccctccccactaatatggtatcagaagacacctcttaggaattcaggacttttacctctgcttagtagtaatgatactgcccactcccacagtgtcagtggagaccatgtggagagcctaacaccacctcaacctgatgttaatggggcctgcctctccacccaggtgtcattggaggctgagtgaagagcctggccttccaaccccgtctgggagtacggaggtggcattgtgttcatctaccagagtggtgtcagcagagatcggctaaaacacaagatttaaataagatctagagcctcaaaagaaagtaccacaaatgtctaggatcaattttaaaaaatcactcaccgccaggtgcggtggctcatgccggtaatcccaacacttcgggaggccgaggtgggtggatcacctgaggtcaggagtttgagaccagcctggccaacatggcaaagacccgtctctactaaaatacaaaaaaatagctgggcataagcgtggtggtgggtacctgtaatcccagctatttgggaggctgaggcaggagaatcgcttgaacctgggaggcagaggttgcagtgagccgagatcaagccgctgcactccagcctgggcaacaagagcaaaactctgtctcaaaaacaaaacaaaacaaacaaacaaacaaacgctcattgtattaggaaccacaaatatctcaaactgaatgagaaaagtcaatcaacatatcccaacactgaagtgacacagatgttagaattatgtggtatttgacgtcataaaatacttcagtgagcaattatgaacatgcttgaaacaaataaaaaaagtttcagcaaagaaaaagtacatgtcagcgaagaaatagaaaacataaagaagaacaaaatgaaaatttcagcactaaaatttacaataactgaaataaaaaaactcaaggatgggctcaacagcagaatgaagagggcagtgcaaagaattggtgaaactgaagctagaaccatagaaattactcgttatgaacaacagagagcaaatagaaaatgaacagcgcttcaggaatatgcaggaacataaaaaagtttataaatttgtgcagagaagagaaatagagtaggactggaaaagtattcaaagaagtaatagctgaaaaattctaaattttgcaaaagatataagccattgttattcttttttttttattattatactttaagttttagggtacatgtgcacattgtgcaggttagttacatatgtatacatgtgccatgctggtgtgctgcacccactaactcatcatctagcattaggtatatctcccaatgctatccctcccccctccccccaccccaccacagtccccagagtgtgatactccccttcctgtgtccatgtgatctcattgttcaattcccacctatgagtgagaatatgcggtgtttggttttttgttcttgcgatagtttactgagaatgatggtttccagtttcatccatgtccctacaaaggacatgaactcatcattttttatggctgcatagtattccatggtgtatatgtgccacattttcttaatccagtctatcattgttggacatttgggttggttccaagtctttgctattgtgaataatgccgcaataaacatacgtgtgcatgtgtctttatagcagcatgatttatagtcctttgggtatatacccagtaatgggatggctgggtcaaatggtatttctagttctagatccctgaggaatcgccgcactgacttccacaatggttgaactagtttacagtcccaccaacagtgtaaaagtgttcctatttctccacatcctctccagcacctgttgtttcctgactttttaatgatagccattctaactggtgtgagatgatatctcatagtggttttgatttcatttctctgatggccagtgatgatgagcattttttcatgtgttttttggctgcataaatgtcttcttttgagaagtgtctgttcatgtccttcgcccactttttgatggggttgtttgtttttttcttgtgaatttgtttgagttcattgtagattctggatattagccctttgtcagatgagtaggttgcgaaaattttctcccatgttgtaggttgcctgttcactctgatggtagtttcttttgctgtgcagaagctctttagtttaattagatcccatttgtcaattttggcttttgttgccattgcttttggtgttttggacatgaagtccttgcccacgcctatgtcctgaatggtaatgcctaggttttcttctagggtttttatggttttaggtctaacgtttaaatctttaatccatcttgaattgatttttgtgtaaggtgtaaggaagggatccagtttcagctttctccatatggctagccagttttcccagcaccatttattaaatagggaatcctttccccattgcttgtttttctcaggtttgtcaaagatcagatagttgtaggtatgcggcgttatttgtgagggctctgttctgttccattgatctatatctctgttttggtaccagtaccatgctgttttggtgactgtagccttgtagtatagtttgaagtcaggtagtgtgatgcctccagctttgttcttttggcttaggattgacttggcgatgcgggctcttttttggttccatatgaactttaaagtagttttttccaattctgtgaagaaagtcattggtagcttgatggggatggcattgaatctgtaaattaccttgggcagtatggccattttcacgatattgattcttcctacccatgagcatggaatgttcttccatttgtttgtatcctcttttatttccttgagcagtggtttgtagtcctcctcgaagaggtccttcacatcccttgtaagttggattcctaggtattttattctctttgaagcaattgtgaatgggagttcactcatgatttggctctctgtttgtctgttgttggtgtataagaatgcttgtgatttttgtacattgattttgtatcctgagactttgctgaagttgcttatcagcttaaggagattttgggctgagacgatggggttttctagataaacaatcatgtcgtctgcaaacagggacaattacaacagagacacaacataccagaatctctgggacgcattcaaagcagtgtgtagagggaaatttatagcactaaatgcccacaacagaaagcaggaaagatccaaaattgacaccctaacatcacaagtaaaagaactagaaaagcaagagcaaacacattcaaaagctagcagaaggcaagaaataactaaaatcagagcagaactgaaggaaatagagacacaaaaaacccttcaaaaaatcaatgaatccaggagctggttttttgaaaggatcaacaaaattgatagaccgctagcaagactaataaagaaaaaaagagagaagaatcaaatagacacaataaaaaatgataaaggggatatcaccaccgatcccacagaaatacaaactaccatcagagaatactacaaacacctctacacaaataaactagaaaatctagaagaaatggatacattcctcgacacatacactctcccaagactaaaccaggaagaagttgaatctctgaatagaccaataacaggagctgaaattgtggcaataatcaatagtttaccaaccaaaaagagtccaggaccagatggattcacagccgaattctaccagaggtacaaggaggaactggtaccattccttctgaaactattccaatcaatagaaaaagagggaatcctccctaactcattttatgaggccagcatcattctgataccaaagcctggcagagacacaaccaaaaaagagaattttagaccaatatccttgatgaacattgatgcaaaaatcctctggcaaaacgaatccagcagcacatcaaaaagcttatccaccatgatcaagtgggcttcatccctgggatgcaaggctggttcaatatacgcaaatcaataaatgtaatccagcatataaacagagccaaagacaaaaaccacatgattatctcaatagatgcagaaaaagcctttgacaaaattcaacaactcttcatgctaaaaactctcaataaattaggtattgatgggacgtatttcaaaataataagagctatctatgacaaacccacagccaatatcatactgaatgggcaaaaactggaagcattccctttgaaaactggcacaagacagggatgccctctctcaccactcctattcaacatagtgttggaagctctggccagggcaatcaggcaggagaaggaaataaaaggtattcaattaggaaaagccattgttattctacatagtactggaagttctagccactgcagtaaagccagaaaaataagtaaaaggcatacaaataagaaagcaagaaacacaactgtctttctttgcagatgacatcacagtctatgtagacaatcccaaggaatttataaaacctcctaataagtgaattcaacaagatcacaaggtacaagatcaacatacaaaagtcaattttatgtttgtatactagcaatgaatatgtggaagataaaattacaaatatgttaatatttatagttgctcaaaaatgaaataattagtaaatcagacaaaacatatataggatgtttatgctaaaaactataaaacactaacgttttcatgatctacttatttagctcttttattttaaaaaaatctaaaccaaagatctaaataagtagatctaaataagtagagagataagtagagagatattttgtggtcttggattagaagaatcaacatagtaaagatgtaaattcttctcaaattgataaacaagttttaagcaatttctatcaaaatcctagtaatttttttgtatatatagataagcttattctaaaacttatatagaaaagcaaaagaagaaaatacctaattcttaaataggaagtaagtcaggaggaatcactttacttgatttcaagacttattatagcatatagctacagcaatcaaaactgtttggaattggcagagataggcacaaaagtcaataagattttatacagaacccagaaataaccccacataagtatgtccaactgatttttgacaaagaagcaaaaacaattcaagggaggaaagaccattttttcaacaaatgatgctggagcaactctatatccataggtataaaaatgagccttgacctaaacctcaaactgtataaaaatgaactcaaatggatcatagatttaagtgtaaagcatacatttataaacttttagaataaaaatcttcaggacctagagcttggcgaagagttcttagacattgcaccaaaagcataatccataaaagaaaaaaatctataaagtggacttaattaaaattaaaattaaaatcttctgctctgcaaaagattgcgtttggagaatgtaatacaaattatagacagagaaaatatttatgaaccacgtagctgacaaaaaactcttatctagaatacataaagaactttcaaaactcaacagtacaaaaaccaaaaaatcctattagaaaatgtataagagacatgaacacacatttcaccaaaggtgacattgcatgtcataagcacacaagaagatgttcaatgtcactaaccattagggaaatgcaaactaagaccataataagatatcactcacacctattaacacaggcccaataaaaaaacagtaacaccaccaaattctggcaaggatgcatagaagctggatctctcatacgttgctggtgggaatgtaaaatgtatagccattctgaaaaatggtttggcagtttcttaagaaattaaagttacacttatcatataaatcagcagttatactcttggacatttatcccagaaaaaatgcaaacttatgtgtgcataaaaacgcgtatggggccaggtgcggtggcttacgcctgtaatcccagcactttgggaggccgaggtgggtggatcacaaggtcaggagatgaagaccatcctggctaacactgtgaaaccccgtctctactaaaaatgcaaaaaattagcagcgcgtggtggcgggcgcctgtagtcccagctactcgggaggctgaggcaggagaatggcgtgaacctgggaggtggagcttgcagtgagccgagatcgcgccaatgcactctagcctgggcaacagagcaaaactctgtctcaaaaaacagacaaacaaacaaaaaaaaaaaaacgcatatgggattgctcatagcagcttaatttgaagtagtgcaaaactggaaacaatgcaaaagtcctttaatgggcaaatgaataagcaaggtatagtaaatgtattccatggagtaccatgcagcagtgaaaagaagggactattgatacaaacaacaacttggatggatctcaagggcattatgtgaatgggaaaaaaccaatctcaaaaggtcacagactgtatgattccatttatataacattctcaaaatgacccaactgtagagatggagaactgattagtggttgctagggatagtaggtatagtaggtatagtagggagaatgggtatggcatgagtgagatctttgtggtgatagaatagatatctttgtgatgatggttgtatccacacaaatgtacacatgtgataacatagaactgtaacaagttgtacccatgtcaattgtctggttttgatgttgtactataattatgtaagatgtaatcattgaaaaaaactaaatgaagtttacatagggcctttctgtactgtctttgtaacttcttgtgaatctatagttatttcaaaataaggattagaaaaaaatccaacctgagatttttcagtccctcactaagtgagtttaatcatttacatttatcatgattcctgatacatttgtatttgtatttattgttattttttccacttactgtgccctttttcttcatctttctgtgaccttctttcttgcattttataatcttgatagtgtttgctatgccctttggcctctccactgtttggaagaccatttttaattacattcttttggtggttaaactaaaaactttaccgcatttacttaactttacatggttctcacacaatctaaagccaagtcagtctctcttctccctttaaataaggcaattatcttagaattctcctatcccctctacatcctgtatgttatttctggggtataatttggtttcacttggtttttaaacatgacaattattatttatatacattaaattttctttttagatttatgaactttaaaaaaccagtttactcccttttatttaacatttcttggatctcatttcttctcttggggcttatgtttattcttgatgaagtatgtttttagtaactcttttcaacctttgtatgtctgaaagtatatttaacttgccctcgctcttgaatggaaggcttagctgggtatagcattcttttctctttgcaccttaaacatattgttcctttcttctctggcatctatagctgatagtgagaagtcagcttctttgtatgtgacctgtcttttgaatttctaggagcttaaattcttttttgatgtttgaagctctatagttatagcatgaaatctttgggtatagcgtaagagaggtatttctggggatagaatagttctgaatctttttttcccttaagactcctggatcagagacaaaaaatagttctgaatcttgaatgtagtggtggtttcacaaatctacacatgtaataaaatggcacagactgtcccccacacatatggtacccatctcggtgagtttctacctttatttctcagctctcatagcagttctcaatatctaatgttatttcatgtgtttgtttgtgggtttattttctttctttcccaagtagaacataagctccataggggcaaggactctattttgttccctggagtgcccaggagagtgactggcaaatagcagatcactgagcaatagatttcattgccaatggactcctgaggacacaaataagtaagtgaacaaaatgatctataaagcatccctaaaattaacaaatataattgacaagatatgacatccataaggtaagtatagcttgtgataaaatggaacagagaataagaaagagtttcttggaaattaaatatgtaattggcaaaataaaaaattcaatggattgtagggaccagccccacagggtcagtgggtctctccctgtgtgcgacgaccagagagtgtagaaataaagacacaagacaaagagataaaagaaaaggcagctgggcccgggggaccactaccaccaatgtgcggagaccggtagtggccccgaatgtctggctgcactgttatttattggatacaaggcgaaaggggcagggtagagagtgttagtcatctccattgataggtaaggtcacgtgggtcacgtgtccactggacagggggcccttccctgcctggcagctgagggagaggagacagagagaaagacagcttacaccattatttctgcatatcagggactattagtacttttactaatttactactgctatctagaaggcagaaccaggtgtacaggatggaacaagaaggtggactaggagcgtgaccactgaagcacagcatcacagggagacggttaggcctccagataactgcgggccagtctgactgatgtcaggccctccacaagaggtggaggagcagagtcttctctaaactccctttcccggtctgctaagtagccggtgtttttccttgacactgaggctaccgctagaccactgtccgctcggcaacgggcgtcttcccagacgctggcattaccgctagaccaaggagcccttctggtggccctgtctgggcataacagaaggctcgcactcttttcttctggtcacacctcactatgtcccctcagctcctatctttgtatggcctggctttttctaggttatgattgtagagcgaagattattataatattggaataaaaagtaattgctacaaactaatgattaatgatattcatatataatcatatctaagatctttatctggtataactattcttgttttatgtttgattttactggaacagctcgtgtcctctgtctcttgcctcggcgcctgggtggcttgccgcccacaatggatgacctagaagttgatgtcaaataaatttcccaaaatggaagaggagaaagacatatctttttaccctttgataaagagaacagataatcataacagagaatcaatttaggagttccagcatctaacagatacatttcccttcaagcatgttttctgtacaccacaagttttcctttctttccttgtcattcactcttaaatgttttataatttttcatgctgacttttttgctaagaaatgttatttagaattgtgtctttgaatgagtaaatatcaatcatttgttttgcttttcttcctcttctttttttctgtactgccagagacatgggaatccctgccttatgcccaagcttggcacgaattcatgttccaatcactcataagtgactctatttctattttctcatatggcttagaagggatcaacaagtagagatttttctaccctcattcatagatagaacattattttctggttccctgtgatgcacaaaacttgagaccttacatcccaggcctgtgtgatcataagtccccattccctcgtacatgtatttggtctacatttctccctccccatcctcagttcacccagggacttcgtggatcagatgtgctcattgctttaaacgtaggtttccttttcatttttgacacccggaatgtttttctatttttacctttcagcttaacaatgtatgtgtaaacatcacattttatccatgtatgtctgcttattgcagtagcacaggtgactcttgcctatagtcagtttgacatctttaccagaaggtacgttggctctttctcccagttcaccaatgtgctctttagctatgaccttcgtattatccaatgtcttgagtttttatttcatcaactttttcttttcttttttcccacttatttaaattgataataattatgtatgtttatggggcacgatgtgatgttttgatctatgtattcattgagaaaaattaaatcaagctaattaacatatgtatcacctcaccaacttatttttttatggtaaaaacactaaaaacattgtagcaattttgaaatatacaatacattattattaactgtggtcactatgcagtgaaatagattactgaaacatacttctccagtctaactgaaagtttgtaatctttgttcaacatcttccttttcctcatcccttcctttttcctgcccccagcctctagtgaccacccctttactctctgtttctatgagatcaaattttttagattctacatgtaagtgagataatacggttttttttttctttttgtctttctgtgcctggcttatttcactaagcatgatgttcttcagttttatcaatttttttcttttttgttttttgagacggagtctcgctctgttgcccaggctggagtgcagtggcacgaccttggctcactgcaagctccacctccttggttcacgccattctcctgcctcagcctctcaagtagctgggactacaggcgcctgccaccatgcctacctaatttttttgtatttttagtagagacggggtttcaccatgttagccaggatggtctcgatctcctgaccttgtgatccacccacctcggcctcccaaagtgctgggattacaggcgtgagccactgctcctggcctccatgttgtcttaagtgacataatgtctttctttttaaaggctgtatagtgttccattgtgtatatatacatttgctttatccattcattcactgatgggcacttaggttgcttccatatcttggctattgtgaataatgctgaaatgaacatgggagtgcagatatctccttgatgtaccaatttcaattcctttatatatataaccagaagtgggattactggatcatatggtagttctatatttatattgaagaactgccaaactattttccaaaatgcctgcattaattgtcttttctccatatccttgccaacttgttatcatttgccttttgataatagtcattctagcaggtgtgaggccatatttcattgtggctttaatttgtatttccctgatgaacattttaaaaatatatctgttggccacttgtatgatacccaaagtcagagaagtacactacaaaagaagaaaactacaggctaatacccctgataagcataggtacaaaaaaaatctcaacaaaatactagcaaagcaaattcaatagctcattaaaaagattattaactatgatcaaataggatttattccagggatgcaaggatggtttaacatacataaatcaataaatgcaatacaccatattaacaaaatgaagattgaaaaccacatgatcatttcagtagttgcagaaaaaacatttgacaaaattcaacatctctttatgataaaaactctcaacaaagaaggtatggaggaatgtacctcaccacaataaaggccatttatgacaagcctacagctaacatcatactcaatgatgtatcttgcatattcaacaagataagaatttccactctccacttctattcagtataatactggaagtcctaaccagatcaattagacaagaaaaagaaattaaaggtatccacagagaaaaggaaaaggtgaaattgtctctgtttactgatgccataattttatatatagaaaacgctgaagactccaccaaaaaaaaaaaggtgttagaactgataaattcattgaagttacaggttacaaaatcagtagtgtttctgtacatcaacagtgaactatctgaaaaagaaattaagaaagcaattgcatttatagtagcataaaatatttagggtaaacttaaggagttgaaagatctgcactctaaaaactataaaacattgatggaagaattgaagaagcacaaatgaaaagatataccatgttcatgtattgaaataattaatattgttaaaatgttgatactatccaaagtgatctacagattcaatgcaattcctatcaaaattccaatgtcatttttcacagaaatagaaaaaaaaatcctaaaattgtatagaaccacaagagactctaaataaccaagaaatcatgagcaaaagaacacagctggaggcatcatactccctgatttcaaaatgcattataaagctattgtaatcaaaacagcatggtatcggcattaaaacagacacattgactgatggaacagtttaggaagccaagaaataaacccaagtatttgcagtcaattgatctttaacaaagttgccaagaagatgcaatggggaaagaacagtctcttcaataaacggtgttgggaaaactggatagccacatgcggaagaatgaaattggactcttatctcacaccatatacaaaaataaactcaaaacagataaaatagttaaatgtaagaactgaagttttaaaatatctagaagaaaacataggggaaaatctctacaacattggtctgggcaataattttttggatagaactccataaacacagacaacagaagcaaaaatagacaaatgggataacatcaaactaaaaagcttctgcactgcaaaggaaacaacagtgaggagacaacttatggattggtagaacatatttgcaaaccatacatctgataaagggctaatatccaaaatctataaggaactcaaacaactcaacagcaaaacaaacaaacaacaacaacaacaacaacaaaacctgattaaaaagtgggcaaacgacatgaacagacatttctcaaaataagacatacaaattacatcacattttttatttccaagattcctagttggctcttttgtcagacagcatgttcttatttgatagatatttatgtttctccttgtcccaggtgttggtttttcttctttgttgagttgggattctgtttgtgaatggtgttagtttccctcaagactttgattagccgtgtgtgtgtgtgtgtgtgtgtgtgtgtgtgtgtgtgtatttctctatttgaagcctgcatttgttacctgcagcctatctccagtaggagcagggatggatatgatgccaattgtgtaagatattatctgggcttgatggctgcctgccccttttggaaaccactagcctttatgataaagcactggcacccagtgctaccatagggagagggatagggacagggaggagacagagtttatccctaactaattttcctattggtatgtctcggatgccactcacttcatatattcattgactctgagcttggagcatttctagagtctctcctaacttttgcagcaagtttctctgaacatcttttgggttgtggtttcctccttcaatccaattccatctacttttcttaattcaggtatgtcttataatttatggtccacctaggaccaccagtgcactccttgtttgctgatatttccatggagttattctttgtttttgtatttttttttagacagggtcttgctctgttgtccaggctggaatacagtcgcatgcgatcatggcttactgcaacctcaacctcccaggctcaagcagttctcccacctgagcctcctgagtagctgagactacaggcatgccccactgtgcttggctaattgttttatttttgtggagacagggtctcctcatgttgcccaggcgggactcaagtgaccctctcaccttggtctcccaaagtgctgggattataggcatgagccaccgtgcctgaccacatttgttctttcaaaagtatcttttctgtcatttctaaggatcttgcaaaggaaagtgaggctagcacagcttctcaatctgccatctcctgaatatttctgttattatttgaactcttaaaaacatgtaccactttttctagaaaaatgcaaaacactagagaaatgttattctgaaagaatgtaatgatggctactatgtgagactatccaagacaattttaaaaacaaaagtaatataaagagattttaccaccagatattaaaagatattttaaagccaagttaataagaatatgatgttggcatagaacaaaatggacagatcagtggaaaagattaggaaatccagacacagaatgtagtatataataaagttggcattttgaatcaatagacaaaatattgtgtttgcacaaatggctgaccatttgataatcttggggtaggaaaaaacttttctaagcagacaccaagtccagaaaccaaaaagtgataagattttatgagttaaaaataacattttcagtacagcaacagcaatcataagctcaagagacaattagcaactagaaatactttcaatatgggtggtaaacaaaggattaacatcattaatatataaatactcagattccaaaaaagaagaaaaataactagtatactcaccaatataccatcttttatatggaaaataatgtgtatatataccatttttatacagttggattagcaaatattaaccagaatgaaaacacccagaggtgacttgggtgtggtacctactacatatctgtagatgggaaaggaacgtaaggataacctagagggagggaaatttgacgtgatgtatcaaaatccttaaaaatgtgtccagaatatttgatccagatgttctaatgctaggaatatattctaagaaaatgatcagacaaatggacaaagatgtgtatgtatgtgtgtgtgtatacacacacacacacacacatacaagcacacacatatatatatacacacataaggtagtttatatcatggaattgtttgtgatagggagaatgcatagcaacttaagtatccatctgtagggaaatgacaaagcagtggttgtcagatgtgagtgtgtgtgtgatttttcccctcaggaggcattcagcagtgtctggagacatttttggttgccacaactggggtgaagggagtgctacaggcatcttatgggtaaaggtcagggatgctgtgaaacatcctacaatacacaggacagcctccttcaacaaaaaattatccagtcctaaatgtcaacagttccgaggttgaaaaaccttgaaagaactgttggtaccttcatagagtgggaagctttttgtgtattcaagatgagcctgtatatttccatttattgaaatataaatatggccatgaaaattatgaaaaaatgttgctggttataaatcagaagtagcaaaacaaagctagactaagcagtggttgaaacagttaaggtatctgattgtatccaaatattaactgtctccaaaattgctctaaatggtgtatcatctttttcaaagtaattagtaactaccaaatatttatatgtagttgttttagtaaggagacttttaaaaataacttctatttctggagttcttagtatatgccaggtattgtactaagtggtttatttcacttctctttttaaaaaggaaagctttttattagtaccaaagcaggacatgtaaattgtacaaaattataaatatgtataatcaagcatttacattattaagatgttcccacttcccaggggaccccatttcgcaacacattggtgcatatccttccagatctttctctgtgtgtatacttttatacatatatgtagtaaatgagatcgtggtgattttaatgtgctttttttcaattcacaatctgcatctttctgctatagtatacttttatatcatccgaccaatattcagaccatatgcaagctttcccaaatgatccaacaatgtcacttggtttatcttccaaaaagagagagagagaacacgaaagagaaagagaaaagacacacagagagagagacagagagaacaggaaaaaataaacctaattcatcaccatttgaaacagctatttggaaaatggtaattaaaggggaagaatcaaacagttatactgtctttcctttaggaactgaattttagggtgactggaaagctccttaatgaaagaaaaccctgttttacctgtgtgccctttgacttgaatctcttgcataccttaggagctcaacaaatgtgtgttgattatggatgaatgcggaccacttggtaggaagtagccatgagtaactcacatcctgagtgatagccttggaaaaatagacctaggaatcacggccaggtcagcctgtgaagaaccaaactgcccatctcttattggcctacacttaagaaacagttcatattttaagtattaggtttgcttcatctacagacgatagcatttgagagactgtatgagtaagaactgttggctggaagcaacaaaaactgcttctgattaacttaagtctgagtgggatttatcagaagggttttgggcagtttacagaagacatgggggatccagagagtgaaaggtgcagccacaggcactgtctgaccatgaggacccagtcacctgaaacactctgttccttccacagcaggcatctccaccataccctgcctggcatcctctattccactccagtcacactgagaaaccttcaacagatcatagtcctttgtgtcattccttttatgttcaaaatcctgggtgtgaatgtctgattggccatgtttatgttgtgaacccatatttagttgccaggaggcatggaaaaagaaatatctccccaatttccatagccaaaagttgggctacctcccactcttccttggatgaacctgtagtggaaaaggagttcggatgaactctgtgcagtggaaatgacagctgcccactctagagaccagtgctcagaaatagtagatatatgattaaatgtccccagtattacaatgaacccacattttctcctctgctcctggccctggttccattgtcttgattgtatagataggaagctgagcctcaaagagggtgagcagagtcccagatccctcagcaattagtagtagaggtgggatttgaacccagattgttagagcttttcccattgcactgcaaaatggtaatggctgtagccaggaagtcaaagagggaagagggtttgccagagatatactctagggttctgtgcaaagcctgggagacagaaaaactgtgatcacccttagcatgcctggactcaaaagccattgagctttggagcaggatgggacagaagtttctttttcagaagaggggaaagtataagagaatgtttattaactgccccatatagacaaggcttggcaagatcttcttgaagcagtcctgaacagctccctccacagcccacccaatcctcctggagctctctccctcgacacttcagaggggggtggggacctccactagccccttcatgccagaaagtcctgcttcttctgacttagctgtaagctcagcgggtttgaatgcaagtccttctccatctcctcttttctcctcctcagtgcagtcagcatagcctggcacgtggaggggaccatcccctttgctgacttacaactggatttcaaaatcaaggtaaaggtcaaggaatggctgtaaagccactttcatgtaatcttgctagcttttcttgaaccattttgggcagaaggccttacctgtaaagtgcacgaggtcagagtgatgcacttttgaaacagagagaagaggagctggctgtcctacagacctgggtttcagagctgtgcaggagaccctgggcaaactactttcctccccaagcctgttttctcattagtaaaatgtggataaacatagtaccatccccatgggtttgtggtggggcacagtgcttggcatttgtatgactgcttcatgaaacgtctgtatttaacagagggaaagagttatttaaagctaaaactagctttagccttttaagggaagaggcaggggaaggcagaaatacctgcactggtggacacataaatttctacactgctctcttgtactcatggagggtccagggatgtgggtgggggaggaacagctggaatttcaagtctctgtcaggtcttctgagtggctcaggacctgcagcggatggctctttgtttagaggacactttgaacatctgtatgtgaaaacatatgtttggagccaagtagaaggtggggagttgttactgttcataatgaagaatgggtaagagctggcaagagaggaaatagccaatgatgaggggtttcacctgcagagaaaagcacagagagaaattctcagtggcagggtgacccaaacactcaggagaacaagaatgtctgatattcatttttaagtcgtttgtgttgccgtgacataaatagccccatccaaaccttcagcaaagtgtgctcttgacattgatgttttgtgtgggcaaattaggggaaatcaagaaaaagaggctggatttcatgtcagactggagtggagagaagaaaaaagccattgcaagtggcacacaagtgaggtcaggacttggtggaggtgacccgggaagcaatgccagggaattgcagaatgctcatagaagaagggcattggactttctgcaggaggagagatgctgattcaagccagttttacttaaatctcaaagacagaatgacttcagtcaatatctgagttccatacacgcggttgagaaatcacatcatggaagaaatagacagagaggcagaattggtgattgcagctggaaagaggaaacatttaattttttaatattaaaaatatctagagtatgagggagtatagtattcattggggctgtttgcaaatgttccatgtctttctccttccaagcacagggcaaaattgcatttccctatatgtctgaagtttgatgtggtcattgataagccttggcctgtgaaagtgagtggagggttccttccaggcaggagctgagtcagtacaggccttgagcctctctctttaccctctgccttggtgactggcaatggcttagaaagtgactgctttgtcaccctgagtcctcattgaggacaacatcaataagccttaaataaaagtttttttttggtttgtttttaaagcaacggaaatttggggatgggggattgctattgctatataacctaagcccatcctaagcccatcctgaatgatacaggaatttgtgcaaaaccttcctttattaaggaggaacctgagacttaggagcagtggccagccttggctcactgagagactgtgcagaaaatcttcaactaggacccagctctcctgtttcccagcaagcagccacctcaaccttgaatgttctacctgctgggagagtgatgcagtgatgctgagccatctacatgcaggcaccaatgagaacaagctccagacagacagcccaagccacttatgggaaaattccttagagttctccctctgcctcacctgcctccagcttggagggtagtccactcatttgcgcttgatctctcaacccccagtccacctgtcctgagtgtgcatgttgcttctctgatgatggcatttgtcaatcctatttgacatcattctgcctttgccctttgtcctctttgcgtttctgattaatctgggcaatggccatcaaataagccatatagagccaaaataacactatataacaagaaccctaaaacctcactggtattccacaataagtgcttaatattcgagctctctttcatcatcttcctgggagcagtggcccaacccaggaatctcattctcctggtggtggcaaaggtaccagagaacaaacagaaacaagtctgattgtctcctgccgtgcaggcttgttggtaggactctcagagtcccaggtggtattatccagtgcatataaacagccaaagacaagctgaataagtatgttggatggcaaagcctttgtaaaagatttatcggcccctgcagaaacagcttttaaatcacccaagacctgtaattgcattgggtgtacgagtaaatgcatctagctagcacctgtgagtccaagttcaccctttgccacttcttaccggcagagtatccattccttatttattgagtacctaatagggatcgtacactataccaggccctggagacacaaggaaaatacgaacaacattcttctcttaaagatctatgaggtctacagttgggtagaaatgtatggtgtggttaagagtaagggcacagagagaaaagactttctagtactgcagagggggcataaagggagggttggataacaaactaagctttgaagttgcatagaaatgggtgtgatagagacagaatgagcattcagacaaagggaatttcatggtggcttagtttgtgctgctgtaacaaaaatatcatagactggtggctaaacaacaagttatttctcatagttctggaggctgggaagtccaagaccaaggcactggaaaatctggtgtctggtgagcacctgctttttggtttgcagaaggctgccctcttgtatcctcccatggcgtgcacacacacatgcagagagagagggggagagaatgagagagaatgaaaggagagaaagagagagaaagtaagctctctcctgtctcttttttataatggcactaatctcatcatgagggctccacttttatgacctaattacctgtcaaaggtcccacctccaaacactgtcacactggggattagggtttcaacatatgaattttggggggacacaaacattcagtccctagcactcgggaaaaggcaggaagaaaggagcatggatatgatgtgtgtttgcgcataaggtggatgaggagtgagtaggtggcatgcaattctagcagggtaggtttgggtctggtgttctaggacctgacatgccaatgtaaggacttaggactttatccagtgaacatttggaatcactgaagagttttaactgggggagaaagagcattcaatgtttgtttttgaagacacccttcatgtaatgtggagtatgcattagagaaaatgacatcggtttggggacagctgtaaagtgtctaagacagagacagcaaggctctgaggggtggacaacagtacagcatggggaggacacagccagaggagacttagttttctaagttgggtgccttaataggaagcactgtctttaactaggaaagagaatgtggaaagaagaggggcaaggttaatatgggtttgaaatgcctgaaggttgcgtgggtggcaaggcttacgagctttggagctgtgactcatgagtgcggaaagaggtggctggagattgggagctgattaatttcctcaaggagagagtgcaagttgaaagaacatgagaaagagtagtcaaagtggtagcaagggaagagggagagagtggtgttgagaaagctaaaaaggaattttgcaaacagaataaggctggatagatcagccaaccgtatacagttttgaaggttgtgtacagcacaaatttagaacaaactatttccaatatagattatgtgaatgaagccttctggaattgtgcagcatgtggccaatatggctgtaaatgtcagacctggccacaaggctggttggaagacaccactggatttgatgtccagactttaccttataccaattaaatcaagaattccaggaatgggaagataaaatgtaggtatcagttttgtttttgtttgtttgtttgaaaggagtcacttaggggatacttaaaagcttcccaggtgattcccatgttaagacagggtggagaaccacagtgtcctgccctctctccatcatctcagtcctgcatcctagcagctaagcattgcttaacaggccagcttcaagtcaatttcatgcttacctaccacaaatgaacattcaacactgctcgggagtcgaaccatgttactccaagggctaccttcccatgatacaagatgaccactttctagctccttctcagtcctcaaaatacatccaccaattcccattcggcttataatctcatctcaaatgtcaccaagaaaacccacaccgttagcatgaaactgcctagtcttcacaccaccaaatctacaatcttaccagaatctctaaccatcttctcagtgcttgcaccgtctcaggccatgccccttcatgtactctagactccacacccactctattctgcatctttagccctctttttaattatgatattctcatttgcacccaggcaaccctaatatctcactgtcgagggtacaggctgctgtggctatccgtacctgggtgacacaccactccaaaatttaatgacttaaacaacaaccattttgttgctcaacaatgtgaacagctcagtagggatggcttgtgtctgctactcatgatattgactggcactattcaactggggctggagagtccaagatggtgtcattcacatgtctggcacctcagctggggaggctccatcacctggggcttggctggggttgttgggcttcttttcttctcatgggctccctcctgtatctgggccctagttctcctccacatgtcctctgtttccatgtgttgtctcatctatcaagacctctctccacttgacctctctctccaacagtacagtgtggactctgcacatggtgaattttcctctgagcaaaatcaggagttacaagacaccttcagggctggacttaggaatctcaaattttcatttatgacaaatgtgtcttctggtcagagcaagtcacaagagcagtccagattcaaagggaaaggtccacctctggataggaggagtagcactcatgtccgtgggaaaatgtttggtggccttgcatgcacattgatactaccttgactctccatatcagagttctgtgtaaggggggagtattgcaggagtcagacaaatgaagatcgaggtacagaacaagttttgttggaagtaaagctaaattggtttaggcaacaatgggcttaacataaacttgttttaggcaacagcgagcgtccttcttctttgaccctgagttggatttactcacttgtttaaatgtacaacctcagaccttcctagccttaggggcagagccttcctgggagagttcacccaacaaaggaggatggagcagggcagacactaggggcagagggtaggtgcgagccacctgagttcattcatccttctagcctcacaacccactcagtccttcctgatcccatggaagaaaggagtagggatgaagaggagagcagaagactgcttcccaagaatgtgctggtctttccacatcttaagaacctgacttggtgtgaaggcagaacagcaggggaagatggtgctctcgaatacactggagtctgtccacttacataccaggtctcaactatggtcagccaagggtgtaatcacctcctaaggggaagagatctgtaattcttagggggcactcactggcatagtaatgtagcctcaccccaagaccaatcaactatttcatcattctgagatcaagggtataatctagttttcttttaaaaaattctttttataaagctgtcttgaccaagtcagggccaggtaccagacaactagggagaacctgtatgccccagagcccacaaaattgttcaaataagccaacccacagagagcctgcaaactctagctaacctcaccctcacttatatacaggcagcccctacatctttagattgctgttaccttgctccccgggcacaaccccctgtgtgtggctgtgactggcagcgttctcttatttggagctgtgcgttaccagagttttgccattcatctgggcaagtttcgttgtattgtgtctcgtcagcagaagaaccctcaaatcttataaaacacagggtgggccatctagctctttccctgaaagctctgaaatagatcagcactgtacattaactaaaccaactctgagacttacatcctgtgctgacaattcactctgttctgttcccatctccaatgatggcctgttgcacaaaatggctcagcttagggcatgtaatgagctccagtgatagattttaataactctattatcataatagtggtgatataaaactgtcccaaacttgaaaaatagcatttagcctcccactatcaaatattcaaatacctgcttgtaaatctagtccaagatacagaaaataaaaattgttaagaactccatgaaaattaaaatctccaaatcactcttgtcaatgttaactctactgtcacaacaaagagatgtcattcatatgcctaagaatataaggagagagtctacatcccttcggcagccacagttagggtgttgttacttcagaacatccaagctgaattcatctaacccaaagtctagtgcctcatgttttacagagaagagagttaagaggacacataagactttcacagctctgatgcacacccatggaattcagaaatacaagaaaaagaaaaaggctgcaaagcaactattccaagaaaaagttgttatttgcattaaaccaaacgtatatgaccattgctgagatgtagcatggtctgagagagggtaaaaagctcatattggtttcagcttcattgtgatgccagcctcaagctatgctagttgtccagtgtcatgagaacaaaactcaagtaggagaaatttcccatcaagaggctaactagaggacttgttttccaaatgtggttgatgctgttggcaccctctcggcatgctctcggccctcactctgcctgtgacgttgatggcttcctcctgcgaacactcgagactctccagctgaaggctttccctgagtgtgggaagaggtgtaggactggccagaagtgctcatgagttaaggacccaggagcagccccctctatgaaatgatggacaggaggagtgctggataagcaccccagcttcctcgctgcttaagtggcacaaatccaaggtgcattgcaccacagtctctcagagggtctccaacaggactgggtctcagttgcccatgcaatgccctttgttgactttccttcctttcctgccccacttcctcactctactgttagtgcttctttggactatctcccaaataatcttcctccaccaaaatctttgtctcaggttcaacatctggaggactctgacttgaaaccccatacctgtgggaaaaaatccatgctacaccctcttttctctctcatagagtggctttttagatactttgatttttcagctgaagttttaaatatatagtattgacatagccagttaccaagtgttgactgaggtgttcctctttaataccttgtgggtataaaacttcttttccaaattccctctcgattttttttttttccctgagactgagtctcactctgttgcccagtctggagtgcagtggcaggacctcagttcactgcaacctctgccatctgggttcaagtgattcttgtgcctcagccttctgagtagctgggactacaggcgcacactgctgcacctgggtaatttttgtatttttagtggagatggggtttcaccatgttggtcaggctggtctcgaactcctgacctcaagtgatccgcctgccttggcctctcaatgtgctgggattacaggcatgagccaccgcttccggtctgaattttatgctccttgaacccagagataaactgagtttaagcagagcctccaacacctctcgtgagtattcatattgattttctcaagctcatgaagctcattaaatcctgaggtgccagggacctggtgaggaccatcactctatcatttgccttttccccagagcctggaatgtgtgccacttgggtggcagctacgaatctttctgctgccacttggttctctgcagcactctctgtgtcatgtgaacctccagtgttcatttccctgtcttttatcagggagttttgggtatgtttttagcattttgacctgtttcttaagtggatcccctgtccttttactctacatatagggtcaccaatgttcgatgggcataaatgcctttttcctcttatttcctcccagcctgtttctctgagacccagatttacctaagtacacctcaggattctgtctggcagagtctcccatcatgagagagaggagcagagtcattaatggcggttatggttagggaatatagttgtgtgtgtgtgtatatgtgtgtgcgtgtatgtgtaagaattaaatcttaaataattatgagaatcaaagatccagagggaagttgaagaatcagagagggagtccctagccagccaatttgagaagccaagcacgtctagcttgtgaagcagaactgtgaagaggaagctcgtgggaggtctctgggaagcccccacctctgtggtacacaagcatctggggtgagcccgagggggctgttggtcagcagaaccagtaattagaccaaatagctggaagctgagtggggagggtgagaacaatctggatcctctggcacctctatgtctagttgccaccatgtgaccaggaccttcagagagcaatggccattgctaactgccactgtctaattgtatgcagagttttttctggcatcctctcaactagaaccgtaaagggagggtattatgggagacaaagctccccgtttaaccaagttgacccagtacaaactaccacagagatataaagtaaattgttcaagtaagtcttgtctatattctcccccatgaattagataagcccatctatatgatcaacattttactactattgctcagcctggctcccctgggcatgtctcgcctcccctttgccttcctttgtgtcctgattccctaaatattccaggcatatttccaagggcacatgccctgaggctcacctagtgatgtgttccatgcattcttgctagggaccttccaaatctgtccataccatctctaagcactgagaaagggctacttcccatgtagtttagtaaagattctctatctgctactttaaaaagctgaggctcctcaattgtttcttgaatctgggccccctctgggaaagttataccactgaactccctgaaactatgtttttcctctgttagatttcttggggtctcaaccttcctgatataggaagaaaaaaaagatagtttcctcttcaagaggccacagtgagctaagagcaggtgtacaactggagcacgcagccacaatataggctgctcctgcacctgccaaagtctaaaggattgttaggtttggtcttgggctgagcccaaagcctgtctctttggccccaaatacttgtccttgtacccatttctcaaggtttcaggcctttgagtcaatatgttgggggtttaaggtaacaataaatcatgtcttttccccccatttctttctgagtatgaaaccaactgggagacaaccacaggattcaaagagaacttaaaatatcagcttgattattacagttatgcttgaggatgatgacttgaccaattaggcttcctaatacttcatcctcatgataggcagggctcttaaggctccccttgctcagggcagagctggctctttaggtggaccaggtggaggagaggagtcctacagacccataacctgggcagggatcctcatgagagagcaaccaggagctgctgggcctcacttgccctgtccatgctcacaaacctatcaaccccataagccattttcctcctgggaatgaaaggcagggagataagaaacattcttcaggtacatttctctcttggggagaagagttaaaaattgtcttcctctatgggagtctgaggtgtggaggaagaaatgaccccatctgctcccacctcctaaaagccagctcctttcttagtgcccctgcactgctgatggcagtgcaaatgtgtagagtcatcagggaaggtggttggtagttaggactgaggctgaggacactatgacccagcagtttcactcttgggcctacattgcaagtgaattctctcgtggtccatgagaggacatacacagagatgtccaccacagcagctggaggcagccttgagtcccagaggaatggaaaggaagtgcagtggaccctcactactgaatactacacagctctcagagcaatgagcccgaggcatgtataaccacgagaaaagagcttctcaaaaaaagtgttgagtgaagaaagagagaactagaacaaggtctgttgcacaatgccatttatgtaaattaaaaggacagatacacaaagagtaagcgtttcatttttgcaaaaaggcacacttgcacactcaaggacatgagtcaaaaacacgagcacgagagcctgtgggggtcagaggtcaaaaggaaagcacaagaaataggccttgcacaaaacgatgatgaaagtgtgccatgaactaggactccggccagctcaacccttggctcctgaggttaaaaaataccctttcctcaaccccatcagttccggcttttcctccttttcccctgaacattctaggggacttcagtgtatggcacccctttcttgcccctctctcactcatgtccctctttggctggttttccatgtcagtggtccccccaaactgcttttccagaagtcaccaatgacttccacatggccagattcatcgggcattttttatttatgttcttcttcattctaaaaattaaggttaaatgaactcactttcttaagggtacagttctgttttgacaaacgctaccaccattgtaatcaagatataaaatggttctacatccccccaaatttttcatggcaccctttttttattccctctccccatccacccctggcaatagtgaatctgctttctgttcctgtagtttcatcttctggagaatgtcacataatgggatcatacattttcaagtgtatgattttgatccagattgtgtgcgtatcagtagcttgttctctttattactaagtaggattttattgtatggaatgaccacagtttgtttatctactcacctgttgaagggcatttgggttgtctccaggtttgggtgattacaaatatacctgctagaaacattcgcatgcaggtggccataggttttcatttctccacgtagagaccaaggaatgggattgtggattataaggcagttgtgtgtttatcttgtaagaaactgtaatggacattttagagttctcattttgctggaattttcagcatcttgtaccatggttgacctcccctttctgtgaggttactttttccagtttctttactgttccccctgccccgctcccccagctcccagccagactgggatgcttcctcggctcagtcctgtgacagtgaaaaggaggcccagtatggctacccccatttcgctcctaaccccctgccccctggaggtgatatcttctaggttaactgcttttgctcctctctgcacatagaccaagctaactataggaggaatttagtttacagtttaactttaaagcaaggatgaaaataatcctttcccaaaattaccccccaagaagataaggagggtgtacgcacagaaaccatgttgtattcaagatttgtgggaacgtgtggcctgaccaaggacagagaggtttcatggcctcatcagacagtcactggtgcccacaagtctgaggttgttggtcacctcttgatcccaaccctttcctgttccccctgcccctaacataaaaagagcctgaaacttttactgacttaagatggttctttaggacgttagtccaccatctgctcagtgtgctggctctccaaaataaagctgctttccctgctccaactccttgcctctcgacttacttgctgtgctgtggctagaagaacaagtttgaacttggttacagtcccggagtcccttccctcaggtgactgcagctgtttcatggctataccataaatgctgtctctggtttgtggctcccacatttataactctctccccagcctcttctaaaccccaggcttatgagtcccactctgaatgtggcatcatctgagagctttctgccatgactctgaaacactgatgtcctctccactccgccccacctcgactgcttctgctctggttttcccaccaaagtgaagacatctccacccaccattgcttaagacaaacaccagggagttattctttatactctccttgtatttgttatctgttgctgcctaacaaattaccacaaacttagtggctttaaaccacacccatttatcatcttacagcttccacgggtcagaagtttggcacagtgtggctcagttggttcccctgctccaggtctcagagggccaaaatcaaggtatcagcagggctgtgctccttactggaggctctaggaagaatctggtcctaagtgtattcaggttgatggaagttccttgcagttgtagaactgaggtccccatttccttgcttgctgccatccagggtgcccttacttctttagagccctctctttgtttttttttttgttttgtttttgtttttgttttttgcacgtgactctatgtgttgttaagaagcaacaacaatttattgtggtaccgtttacaatagcaaagacttggaaccaacccaaatgctcatcaatgatagactggataaagaaaatgtagcatatatacaccatggaatactatgcagccataaaaaaggatgagttcatgtcctttgcagggacttggatgaagctggaaaccatcattctcagcaaactaacacaagaacaaaaaaaccaaacaccgcatgttctcactcataagtaggagttgaacaaaaagccaaacaccgcatgttctcactcctaagtaggagaacacatggacacagggaggagaacatcacacaccggggtctgtcggggggcagggggctggacagggggagcattaggagaaataacaccatggcatgtgtatacttatgtaacaaacctgcatgttctgcacacgtaccccagaacttaaagtattaaaaaaaaaaaaaagcaacaacagcacatagaacccttctcatgattgacatctctgttttgccctggtgctgcagctctctgactgcggcaggaggaagttatctgcctttaaaggcccattcagttaaagtgggctcacctggataatccaggctaaatccaggataatctccctatttaaaaatcagcagtaacactgctgtgggttgaactgtgtctcctgaaaaggtatgttaaagttataaccctggtactcatgaatgtgactttatttgtaaattgagcctttgcaaatgtaatcaagttaagacaaagtcagatgaggagtaggtggaccctgaatccaatctgactggtgtcctattaagaagaggaaaagacccagcactttgggaggccgaggtgggcggatcacctgaggttgggagttcgagaccagcctgaccaatatggagaaaccccgtctctactaaaaacacaaaagtagctgggcatggtggcacgtgcctgtaatcccagctacttgggaggctgaggcaggagaattacttgaacctgggaggcggaggttgtggtgagccaagccaagattgcgccattgcactccagcctgggcaagaagagcgaaactctatctcaaaaaaaaaaaaaaaaaaaaaaaaaaaaaaaaaaaaaagaagaggaaaagagaaagaaaaacacacagaggctctgtcatatgaagacagatgcacagagggcagatggctgtgtgataacagagccagagacacaggttatgcagctgtaagccaaggaatgccaaggactcccagtaacaacccagagctgggagagaggtcacggccctgctgacccctcgatttcagacttttggccagtagatgtgtaagagaacacatttctgttgctttaggccactccatttgaggtgctttgttacaaaagccccaggacacaaatacaaatcccaattacatctgcaaagtcccatgtaaggtcacatatgggtatggtcacatataatgcccatatataaggtcacatatgggcatcagattcacagtcccagagcttacagtgtggaatcttcttgaggccataattctgcctacctcctctccccgttccatatagctaatccatcaccaagtcaattctttcttaaaaaatttttaaagtttttgagctatttatctgtatctctactgtagtcaagacaccttcatgtcctacctggattattacaatagttcactaacttatctcctcgtttctccccttgcctatctcacaaaattctttcttacaaaacaatcagatcattttagaacacaagttggatcatatcatttgtatcagtgtagaatttattcaggaacaagtaagagaaaatccaacttatgatgacttgaaaaaaaagagagatgcctattttttctcacatgagaatgcccaacacaggcagtccagagctgatgcagaagctgaataatgtgattaaggaccgagtcactttctacatttctgctttgccattcttaaatttatttaccttctgtcctcatggttgcaatatgactgccatgcctccaggcatcacatttgtgctcaggatggaagttagtgaaggacaaacgacaaaacctgccaaagtttacttccctttttattaggtagtccaaaaatttctcagaaactgttcttactgaacataagcttatatctcattgtctaaaactgtatcacgtgactatccccagctgtgagggagccttggaaactgaatatttctttagagaaaggcaagagaaaatgatgttgagaatgggtattccatgagcctatctacatcatctcccttaccactgtcttgtttagaagctctctgtttgatttattattattatcattatactttaagttctgggatacgtgtgcagaacgtgcaggttttttacattggtatacacggccatggtggtttgctgcacccatcaactcgtcatctacattaggtatttctcttaatgctatcccttccctagccctcaaccccctgacaggccccagtgtgtgatattcccctttctgtgtccacgtgttctcattgttcaactcccacttatgagtgagaacatgcggtgtttggttttctgttcctgtgttagtttactgagaatgatggtttccagcttcatccatgttcctgcaaaggacatgaactcatcctattttatggctgcatagtattccagggtgtatatgtgccacattttctttatccagtctatcattgatgggcatttgggttggttccaagtctttgctattgtaaatactgctgcaataaacatacaagtgcatgtgtcttcatagtagcatgatttataatcctctgggtatatacccagtaatgggattgctgggtcaaatgatatttctggttctagatccttgaggaatcgccacactgtcttccacaacggttgaactaatttacacttccatcaacagtgtaaaagcattcctatctctccacatcctctccagcatctgttgtttcctgacttcttaatgatcgtcattctatctggtgtgagacggtatctcattgtggttttgatttgcatttctctaatgaccagtgatgatgagctttttttcatgtttgttggctgcataaatgtcttcttttgagaagtgtctgttcatatcctttacccactttttgatgggattttttttcttgtaaatttgtttaaattccttgtagattctggatattagccctttgtcagatggatagattacaaaaattttcccccattctgtaggttgcctattcactctgatgatagtttcttttgctgtgcagaagctctttagtttaattagattccatttgtcaattttggcttttgttgccattgcttttggtgttttagtcatgaagtctttaccgatgcctatgtcctgaatggtattgcctaggttttcttctagggtttttaggtcttagtttaagtctttaatccatcttgagttaatttttgtataagatgtaaggaaggggtctagtgttctgcatatggctagccagttttcccagcaccatttattaaataggaaatccttcccccattgcttgtttttgtcaggtttgtcaaagatcagatggttgtagatgtgtggtgttatttctgaggcttctgttctgttccattggtctatgtatctgttttggtaccagtgccatgctgtttcagttactgtagccttgtagtatagtttaaagtcaggtagtgtgatgcctccagctttgttctttttgcttaggattgtcttggctacatgggctcttttttggttccatatgaaatttaaagtagttttttccaattctgtgaagaaagtcaatggtagcttgatggggatagcattgaatctataaattactttgggcggtatggccattttcacgatattgattcttcctatccgtaagtataaaatgtttttccatttgtttgtgttctcttctatttccttgagcagtggtttatagttctccttgaagaggtccttcacatcccttgtaagttgtattcctaggtattttattctctttgtagcaattgtgaatgggactttactcatgatttggctctctgtttgtgtattattggtgtataggaatgcttgtgatttttgcacattgattttacatcctgagactgctgaagttgcttaccagcttaaggaaattttgggctgagacgatggggttttctaaatatacaatcatgtcacctgcagagacaatttgacttcctctcttcctatttgaatacgctttatttctttctcttgcctgattgccctggccagaacttccaatactatgttgaagaggagtggtgagagagggcacccttgtcctgtgctggttttcaaagggaatgcttcagcttttgcccattcagtatgacattggctgtgggtttgtcataaatagctcttattattttgatacatgttccatgaatatctagtttattggctttttttttttttttttttttttttgagacggaatcttgctctgtcgcccaggctagattgcaatggcatgattttggctcactgcaacctccatcccccaggttcaagtgattctcctgcctcagcctcctgtgtagctgggattacaggcgcatgccaccattcctagctaatttttgtatttttagtagagatggggttttgccatgttggccaggctggtcttgaactcctgacctcaggctgagatcatctcagcctcccaaagtgctgagattaaaggtgtaagccaccatgcctggcctctgtttggcattttaatgcagtataaataaaattcgaatttcctcactgcctctctaatattataatttatgactcgtctccctctctgggtgtgccagtcactgcagcattttttttttttttaagactgattctcactctgttgcccaggccagagtgcagcagtggcgtgatctcggcttactgcaacctctgccttccgggttcaagggttcaagcgattctcctgcctcagtctcccaagtagctgggactatcggtgggcaccaccacgcttggctaatttttttatatttttagtagagaggggttttcaccacgttagccaggatggtctcgatctcctgaccttgtgatccacatgcctcggcctcccaaaatgctgggattataggcgtgagccaccggcccggcttcactgcagcctttttcctagttctttccttatgtggaggctttgctcatgcctttctttttgtctaggaggtagattgcattattgctcctgattcttcactctgtccctgtaataaagtgtctactcatgcactttacagagcctctctgtggaggaagtaagacatgttttcttgctccagtacctggactgatgtatgttaatagatgtgatgctagcagaggctttagatgtgtttgggatgtttgtcttggcctcttccacttctgtcatccaccatgagagatcgtgttcctgtagctttttggctctgagtgggacactggagctaactcaaaaccaacctgcagcctgatgctgagcccagctgagtccagccgagatcacccagactccagccaaatccgagactgagtgagaacagtaaatggtattgcaagccactgagactgcttatgattgtgatgcagaattaatgccgcaaaatctaacacagtctgaattattcttcctctcccccacactttaacttatacttatcttttgggtcccaaatgaaatacgacttcctcagagagacttttcctgtatccccaaagttagttgtgctaagctttctcatagaattctattctttcctatgattaaatctagcataatttgtaattgtagctttgttctcatgttcatttgttaaaaatataccgtatactatagactgttagctccctgagtgtaaactcctgtttgttaataaatcaacaccaaacaccaaatacaaggcctgcacatagtaagtgctcaataaatgtgagttattgtttattgaacaagtataccccaatcgaagaaatataattgagttattcaaaattttgttcttgaagaatttttcaatgacatgtaacctatagttatagaattataatctaaattgtatgaacaaatgtgaatgtattcatataaaaatattcaaagggactataccaaagaattaataatgcctatctctgtgtggaggccttatactttatcttttttattttttataattttctgtattcgatacagttcttctaatattgtggcaatatattacttttgtaatcagaaaacataataaaagttattaaagatacacatttatcttttatatgtatgtgtgtgtgcgtgtgtgtgtgtgtgtgtgtgtatggacttaatcatgcttttcttagtgatgtaatgagaagattctaaagaacatcagaaatcagacaaagcctgggtgggtggccagaacattctgagttggaaatagcttgtcctgggtttctctggtttcagggctccccagagtctgttccctgccctctgggagggtgtctgacaaatacaagggacattagggtcaagaggaaggcatggtcccttcatggtcccttgggactaggctgactgggagtacgagtagctgagtgagactagatagtttggtgggaagtttagaccaatgccatcttgaagggtggaccaggtgagcagcccagcagagataccagatggaactgtacatggcaatttgcctctccggagaccatgatcttgaagcaaatgagcaccttgattggctgtttggatttcataggccagaagtttccaggtaggatttctcagataccagggttcctcagggacatctcctgtgggacaaggaagggcaagggggaagctggaagggcctcgcatcccctcacttcaacccaagcaggtcctctattatctgtaagagcccactaaaagcaaaggaacaaagggttctattgctaaaaaaggagttggaggtgggagtggtccttaaaatcagtgacaatgataggaagccactgaagactttcaaggcggggagtgacttattcaacacaaggctgctgttttcacagcaccgagcaggccaggctgcaaggccaggaggcttgaagagaggctggaagacaagagactgttgccgtcagtgaataatgtgactgtgataataataacaataatatttattgagtcaggcactgttctaattcctttacctgtattaactcattcttccccataacaatcctatgaggtaagtactattattatcttcactttaccactgaggaaacggaggcacagacagagatggtaaataactcatggtaaatcacacagccagaaagaagagaagctgggatgtgatcccagacaggctgagccttgcccagagggaggttgaggacaaaagtccatctggcctaatagactggcctgatcttccttcattatgcccgctgttgcactgtctcttgaccttttaatagtgtctagtggatttaggttattagccagacaaacaagctcccacggcatgaggacagatgggataggggtgggaacagcagaggatcaaagccatactgaaatgtcgagtctaaaatccttggaggcaccgacattgaaggaataaggtaaaccaggagaaggtgatgctgagtggaatgtgtccagtttgggatgacgaaggtacccaagggacatgcaggtggaatcagtgactgtaacagcatgaaccattacacacctgcatgtttagcatgaatcagaatcacctgtagtgcgtgttaaaccaaagatccctaaacttcatccccggagtgtgtgactcagtagaatttttattcctaaaaagctcccaggtggtgctgatgttgctgggtccatgaactacactcaggagtactgttttgcatctcccagccagcaaagcccttatgcatgtacgatatcacgaattcttctgaaatgcttccccaattatattttggtgacattagggttttgagaaataaacatacgaactcgttttctcttgtttctgacacccttttcttgagtcatcaaaacccctaagtagctgtcctacatctgtgcctttacataaattgttcttacagtcagctaagccctccctaccctgcctccaaatttagctaatttattttattgcttaaaagtttatcttccctaggaagcctcctctgacctcctaatctcatttggttgcccctgctgtgtactcccatggaactttctacctacttctgccatgcactcagcacgcggcactatatctttaactgtccttctcctccactgacatcatagactttgtatcttgcagtgcttagggcagtgcttggcatatggtaaatgctcaataaatatgtgatgaattcagttaagtgaatgaataaacactttcttctttatcagagctatcatcccctaaatctctttcatggtgcattctttttttaattaaggaaaaacttttcttgagatgcatgaaactatgaattcataatgtaaaattaaccattttaaagtgaacagcatttagtgcactcacaatgttgctcaaccatcatctatatctaattccaaaacactttgattcccaaaaggaaatccatgctcattaagcagttattccccattgcccatctcctcaacccctgacaaccaccaatttgttttctgcctctatggaattaactattctggatgtttcatataaatagaatcatacaatatgtaaccctttgtgtctggcttctttcactttttgaggctcattcacattgcagcatgcattagtacttcattcctttttttatgattgagtaatatttcatggtgcattcttaatagcacactctaatctctagaacaggcgtggaaaatgtgctttgtcttagattccagttcctatcaattactgtacaggcgattttgaggccatatctgggcacagtagaaaataacaagtgattgatcactgttatgggcaagactgtggggagtgggggtgataatgccatatatatgtcactcccactctagactgaattgattctcctctcctcctgtccatgctaaggatggggagtttcgataatagggctcaagatacaactggacccagtgcatttttcaggagtattgagaaggcaacattgtgaatctggggtaatcagggagggctcactggatgcagtgacgtgacctcagcaaacggaattctcagcctctgagctggctgctcagaaaaacaaaactgattctcctcagacggagacgggttggctgagggaacttagggtatatggccctaatgcaaagtgaccagtgtctaacacaagtttctttcttgttgcttgaatttcccagggtggagagccccagattgggtattctggccctagggagagttaacagatcttggcacatttttggaccagggcagtttccaaataaagacctgcatatcccgactggttgtcaaatggaattagtggctttgagttcagcctgttcctcactagagttaccacatatagggaatgttctggcagcagagggaataccaaggggccagggcaggaccaagggagtggagtggtgggcagtacagatgctcctcaactcatgaggggactatgtccggacaaacccatcagaagttgaaaatatgctaagctgaaaatgcatttaatccaactaacatgccgagcatcatagtttagcctatgctgccttaaacatgctcagaacactcatattagtctgtggttaggcaaaatcatctggcaacatagtatactgtagggtatccattgtttaccctcctgattgtatggctgactgggagttgtgtcttgctgccactgcccagcatctcaaaagagtatcatacctcatcttgctagcccaagaaaagaacaaaattcaaaatttgaagtacagtttctattaaatatgtgttgctatagcacccttgtaaagttgaaaaattataaatcaaaccattgcacatcagggaccatctgtataagcaaggccgctagggtgaagagatggggactccagggagctcaatttcctctgagggtgttcctaattaaatggctttgctttttcttattttaggccacaattaaaattctaagtggatcagttactcttgttaggtaaaagattttccaccttctctctggctagagtcccatttgcactctctttaaaatccaatgctggatacattcaaggctccagatcaaatttgggaaagggattctccttccagcctctagaccatgtgatatgggaaatgccttcttgagctcagccttgaggtctctccaacctagatctccctcaacagatgttctacctaatcccccaaacactgccactatgagttctttggcaagggatttccccgcttttcctggttcactttatgcaccagcctagattattctagctagtatgtaaggcatatgtcccagcatttagggcatctgggatatgtctttgttttatgtcttcacataaagatttaatgttaaaggacacagaccagtaggatactgtcatccaaatccggaccatctaagtaagagtcattgtcagcccttggggtagctctggatagaggtactattgtaaatcattcctagggaagtcttaataaagaatagttcgtgaatataaacaggtgttcagcctttggaacttatcaaagaggacggccatttgtcactcagggatgtggaggagagctcctgaaacacagtgatacaagtaatagcattctattagattagttctatggtcaaacaacttttggaaattccacacagcgtatggaatttgtcacaagacaggtctgtcaaaggccattaagatttcctgtagtaaggagcatatcttcatttggcaatttggcttgctttgtttttgtcctaattacttaagtagatcaaaagggtcttgaaggcaagaattatgactttgaaccaatgcacatcagaacccagcccacactcagaaaattatgaagttagggccgggcatggtggctcacgcccataatcccagcactttgggaggccaaggagagcagatcacttgaggccaggagttccagaccagcctggccaacatggtaaaacttcatctctattaaaaatacaaaattaggccgggcacggtggctcaagtctgtaatcccagcattttgggaggcctaggcgggcggatcatgaggtcaagagatcgagaccatcctggttaacatggtgaaaccccatctctactaaaaaaatacaaaaaattagccaggtgcggtggccggcgcctgtggttccagctacacgggaggctgaggcagaagaatggtgtgaacctgggaggcggagcttgcagtgagccaagattgtgccactgcactccagcctgggcatcagagtgagactcagtctcaaaaaaaaaattagccaggtgtggtggtgtgtgcctgtagtcccagctactctggaggctgaggcaggagaatcccttgagcctgggattgaaggctgcagtgagccaagactgtaccactgcactgcgtgggtgactgactaagactctgtctaaaaaaaaaaaaagataaaaagaaagaaaaagaaaattatgaagttaatccctgctgtctacagcccctttagagtatccagacgggtcccctgtgggtgaagtcctataacatcacccccttgtcctattgtgccctgccttcctcctgtggacatcagaatgagcagccaggccctgcttttcaggcctgggaaaatggaaagaaaagctatttcaagaaagaggccagtcgggatgcctgaagaagatgagttaccatggtgacaggataagactttgtcactttgaaaaggaatgacttttttttcctacaggaaagccattcagtgggcagagatggtggctctaactgaggcttttgtcagctacggtcctttatcaccatgggtgttggtgcactgtcagataatgtagagtttttcttgcataaggtgctacgctggacccaggaaacagggctgggagttgggactcctagagccacttctgccttgacacaacttgtaggcttaggcaagttgcatcatttcctctaggtccagtttcactatttactaaatgcatagctgaaaatttggagcaggagttttggtgagtttcaaatgctgcatcattcagttaaaatccaagcagggtcttttttctttttttcccccagagattccagaaattaagttgattctgaaatgtatatggaaatgcaagggtctagagtagccaaagtaatcttaaaagagaataacaaagggccgggcatggtggcttatgcctgtaatcccagcactttgggaggctgaggtaggtggatggcttgaacccaggagtttgagaccagcctgcaaaacaaagtgagaccttgtctgtataaaaaatacaaaatttgctgggtgtggtggtgcacacccatagtcccagctacttgggaggctgaggtgggaggattgcctgagcctggggaggttgaaagtgagccttgatcctcaattgcaccactgtactccaacctgggcaagagtgagactctgtctcaaaaaaaaaagaataacaaagtggagaacttacaaacttacattacataatttcaagactaactattaagctacgatagttaagaccatgcaataccagagcaagaacagacaaagaaatctatgaaacacaagaaagagcctggaaatagaccctcacttaaatagtcatttaattttcaacaaaggaaatccaatggagaatggacaatcttttcactaaatagtcctgagacaaatggatatgtacatggaaaagaaaaaaacctcaacttgtacctcataccatatataaaaattaattcaattatataaaaaaaaccccccgcattcctatgtttgttgtaataccattaacaatagcaaagtcatgaaccaacctatgtgtccatcagtggtcgattgaataaagaatatgtggtacatatataccatacaatagcacacggccataaaaggaatgaaatcatgccctctgcaacaacatgagtgaagctggaggctgtgatcctaagtgaactaactcagtagcagaaaaccaaatatcacatgttctcacttataagtgggagctaaacaatgagtacacacggacagaaagttggaaacagtagacactgtggactccacaaaaaagagggtgagaggaagatgaagagtgaaaaattacctgctggatacaatgttcaatattcaggtgacatgcatactagaagtccaatctctaccattgcacaatatacccatgtaacaaacatgcatgtgtacccccggaatctagaataaaaattaaaaacaataatttgggatgaatggtatacctaaagggtaaaagtgaaagcttcttaaagcaaatgttccattaaaatgtgaaattctcctgtgtgtgttcaccacgtgttcctcacagacctccctgggccttgtcccgtggctcctcctgtccttaatgtgttccaggagttcatttaagcacctgtggtggtttgtattatttggcaaattgtcttaaggtgagagtttcatagttcctcttaaaagtgcaccaaaatgcgatggccttatccaatgtagaaagtggccttaaggctgggcacggtggctcacgcctttaatctcagcactttgggaggctgaggtgggtagatcacttgaggtcgggagttcgagaccagcctgaccaacatggtgaaaccccgtcgctactaaaaatacaaaattagctgagtggggtgacacgagcccgtaatcccagctactctggaggctgaggcagggaatcacttgaacccggaaggcggaggtagcagtgagtcgagatcatgccattgcactacagcctgggcaacaagagcgaaactctgtctcaaaaaaaaaaaaaaaaaaaaaaaaagcagaaagtggccttattcaaatgtccattactcgtaaaacgagggagcttgtccacaatgtgaacttttgggatctttctggttctaaatgatggaggaagtgatgactcccaggaaaaatactcaagatccacaagcaaagaggggcccaaactctagtctgagatcgtgggttttaaggataacagatcccttcagatttcgaggccagcctgggctggctgggcacagtggggcagaggagaagggaaacgaaaggggaaggcacaactcaaccactgattagtcctggggtagagagctggagtcacccagtgcatgttccaaaaacagcaagaaaaatagcccctgctcctcccccagggttgtgggggactgctagatggcagctagccgaccccagttcttttttgtttctttcttttcttttcttttttttttttttgagaaggagtctccctcttttgcccaggctagagtgcagtgatgtgatctcggttcactgcaacctctgcctcccaggttcaagtgattctcctgcttcggcctcccaagtagctgggattacaggtgcgtaccatcaggctcagctaatttttgtatttttagtagagacggggttttaccatgttggccaggctcgtctcgaactcctggcctcaagtgatccacccacctcggcctcccaaaatgctgagattataggcgtgagccgccgcgcccggcccagaccccagttcttacccaggatgtcactgttgactttgggcacctgctgggcctaggctttctcatttgtaaaatgaggggcttaggttcagaagttgggtttttcttctgtttttaacctaacattttgtttcattgattaaatacattttaataactcactccctttaatgtctctgcctcacccccttctccccaccacggcaccctttctgttgagtgtgtatcttttgtgtagatgtcttcttgcagaatatgtattgccgtgttctggccaccatagttcaggtaaagaagatagtaatcttctattacctcagtctgtcttatttcgtttggtactatgtttttgagatccatgctggttgctataggtacatctagcctgatgaggctggctccaatcagttgttcacaaactgtgccttgtgaaaccttagtggttccccttgtcaccttgaagagcactggagggaagaggaggagaagtagatttcagagttgcccaccacccctggtttaattctcccacctccacttttatctgttttatgcactgagcctatgttcacctgggattttgttccgttgttaaaatccctagcctaggaaaggactggagttcttcccagctcggcagtcaggagctatgcacagaaggagttgagcaggtaatagaaaccaaggacttggctcaacagtagcaggtccagtgaaggaggctcagtggaggccatgaagtcacaatggggcttgtatggtaaggactatgatgtggaaggagccaggaagcacccttctctgttctctggtctggctggcccccaggtctgtgatgatggaagaattttacacagaccccctttctctcatggctacagaaaggttttccaggtgtcaaagtgttgggcaggcttctgagcctgcaagaggctgtgaactgcacattaggtcaacactcctttgcggggtagacaccaacaatgtatctatttgacttaaatcagacccagccccagtttgtcctaggctgactgtccacagagcaagataaggtgtcctaggtaaacatagctctatacatcacagaagatcttggcttcccagatagagtcaggcttcatcctacattgtcacccaggaaaggttggggtgcagttttggcacatgaaggatgactccagatggttgcgtcagacagattggcagggttttgacattctaaccacaggtgtgggttctgctctttagctcttttcatgttggaagtgtgtccttattgctgccttgggagcaattagatgtagctgctgctgctttttttttttttttttgagacaagtctactctgttgccaggctagagtgtggcatgatctcggctcaccacaacctctgcctcctgggctcaggtgatcctccagcctcaggctcctgagtagctgggactgcaggggtgtgcaactacgcctggctaatttttgtatttttagtagagatatggtttcatcatgttgaccaggctggtctcaaactcctggcctcaggtgatctgcccgcctcagcctcccaaagtgctgccaccacaccctggcctaaatccatcttcttatacacaagatgctagaatgtcaacttgccattaaccatgccaaaaagacaggaagtctttttcagtcactcaggacattgttcactcacaagaaagcacacagtgactgagagtattagcagagggtgacctcatgggcatgggaccaggagaagtaggtagtcttaggggaagataagctcatctgtaagatgtatccccaaggatggcaaggacagggtccggggtgtttggggagcagtgttagtgcagctggaaaaaaaaattcctagagtaaaggtttacggattaagagaatgggagcagagagcaaattgccttgtaaatcccaactttaccccttaatctccctcccatgtttcttgtgacatggatcatttaaaatttccatattagcccttgtcacatgctgcattatattcattttagaatataatagcacatcttttcattagaaaagttagagttgaccaggcgtggtggctcatgcctgtaatcccagcactttgggaggctgaggtgggtagatcacctgaggtcagcagtttgtgacagcccggccaatatagtgaaaccctgtctctactaaaaatacaaaaattagccgggttgtggtggcatgtgcctgtaatcccagctacttgggaggctgaggcaggagaatcgcttgaacccaggaagtggaggttgcaatgagctgagatctcaccattacactccagcctgggcaacaagagtgaaactccgtttcaaaaaaaaaaaaaaaaaaaaaaaaggaaagaaagaaagaaaagttacagttaaatttttacaaagaaaacaagattgttgttgacatcacatgacttaaactccacaattctgagtatcaccccatttctaccactaaatagctctgcaacttgggccaagtcacacaaagacagagtggccaagtggtgggagcctactggtctgtgcctcctgccctgaatcatgaccggtgcacacgcatccatgtccgctctgctccttacagcctaactctaagcagtgctggcctcctcctgcccaaggcaaactctttcatccatgctcaagatccctcccctcctagatctgtactgcccacttcccattagtcagtacccccatctccttttttcatcctcagccatgagtcttcgtcgttcctaagtcctgctatgcgttctctctccccgtccttcacggcaaactctttgtaagagtggacattgctttctgacttcaatctctctcatgattaaagaaatccaaatttaaaaatgaaatactgtttttcatatatcagaccaggggtaaaattaacattgataatacctagcgtcaatgagggaataagaaacagacattgtttccctactctttttgtggaaacataaaccattgcatccttttttggaggacattggataatatatgtcaaaattcaaattatttgacccgacaaacttcctgctaagagtttactgagagggcatctatataatgtatattaggcagatttttttaaaaaaacagatttatatataataaaatatgcaaggcacagaacagtgtatatggtataatctcttttgtgttaaaaataagaagaaaagataagtgaatagacacacattttgttgggtatgcatatcttttccctgaagggaacaataagaaattgctaatgttgattaattaccaataggaaagggaatatggagtggaaaactttcacctttcatttagaaacttcatatatgtcttgagatttcttaatttacacacaattattttatttattatttttacatatcaggagttacctgaatagagacagtagaggtcaacttttattttcttctttgtatttctgtctactaagaaatactaaagaaaacaataagggcaaatgataagaaatagttatagagaatataaactatgtaaaaagagttttgcttttcaagtacggtaaattctggtcctacatattctagcctttagccccatgaggttggtctaactatgaagatacctagcccaacttctttctttcccacatcccaagcctgtctcagtcttgcaactcccactccttaggagtgaatgccccaggaaaggaaagtcctgggggaccaacggtgtctccttgcagcaaaaggatctgagtgtgttcttgcagttggcccagctggcccaggcactggttaatctgcggcagacacagagctcacccgcttttctctgaagccctggctgttgtaataataaaatttggctcacagacaggatgggaacatcattctctcagctataatcacaatgagcctggggatacacactttatgtcctgaatacaaagcgaaggaatgggcaaagacaacaaggggagggaagatgaataggaaaataaaaagtgataaatatctctaggagctaaagaagggacaaagagaagaaaatggagtgggaagaaggaaaatcccagaaaaaaatataacgagaaagagagagaaaaattgtgaagagaagagaaggtgatgataaaaaagagagacaaataagaaagaaaggagaggtgagaggaagaaagagaaagggggaaagaaggagggagtttcacctaagacaccataaaactttcatagacaataagtctctcccataaacaagatgaggatgagttaaattaataggaattcaaacatgtggattatatttcccttcaaagccacatgggtttctaaaagaaacaggctaggggttggaggcaaaatgcaagcaatgtttttccaatctcatcatttgacaaaaaaaaaaaaaaaaaagtatttgcagttggaagagtttgacatgcttttgagttcagtgaattctgtgttcttataatcacctcttctctctaactcctgcttttgattatgggaagtgatgcagcttctgagaaaataacatctgccattttggaaacgaaaaggaaatgaatgcacaatcattgtctcacctgagggaggcctcacaaatcatccgggtgtgtgttgtgatgttggccccgcagggatggtaaggagggtgtgggttttatttgtggggtccaggccatctctcatgcagagaacagccttgcacagaagctgaagggacacctctgccttcagacctcagatgccatgttcctcacgatctaacaagaatattctcactgaatcagcagtcccagtgccctagggagaggggtgggcggatgggtgctcacttcctatccctgttggcgtttcctgcccacctatttcaggttgccttctaactggctctgagctggctgaaatcatgcccacagcttgcataggagcctggctgacagggcctgagtgacttcacatgtcacctaccagtgacatagatcagagcttacagtgaactgatagaagagctcagagaatttgccatgaattgttataaaccaggaggtgattccacctgccttggactttctcttactgatattcagtgctctgttgcctcaggactcagacagtgcctacaaaatgccaaaccatcagaaaaagctaagagcttattaatcatctgggaacttccaaaagaagtcaatcagtgatgtaacatgcagcaaatgcacatctgtcatgtgtcctgtagtgacagatgctgtccttgttctaatcaagccccctcagtgaatctcctcacagcttggacactgcctctagctcatgtgtgctttgctcctagaggcccgaacctatgacttccttcaaataactgaaccaacccttggagctactctgcccaggcttggagaccttgaagtgcctggtagtctacatcccccagtagccacagactgccggggcaggagcctgaaggccttttgactcaaggggtcacttgcagacagggtcaggccaaggctgggactccccctgagatcacctccttgcttggcttcttcccctccccttttctgcttaccctactctcttactggtctcgcctggaagcacttccttaagaaatcatttgctcttgtactgttgcctcagaaaaacatcttggagaacctgacccaagacatctgcctcatgataggcacaatgaggagaaaaataaaactcttgccttcaatgtgactgtcccacaacaaagcagttaagaaaaaatgtatatatttttgagacagggtctcactctgttacccaggctgcaagcagtggcacaatcttggctcactgcacctccacctcctgggttcaaacgattcttgtgcctcagcctccgagtagctgggattacaggcacgtgccatcacgcctggctaatttttgtatttttagcagagacagagtttcgtcgtgttggccagctggtcttgaactcctggcctcaagtgatccacccacctcgccctcccaaagtgctggaattacaggtgtgagccactgtacctggccaggaaaaatatttcttaaacagcaacaagggggcaaaaatgttggggttcagttacaccccatctctgtcattgaatgcttgtcatggtgccagcacagagtaatgttaatgttaatagaaaagaagagtgaatagagccagaggagagataggggcactttcaaaagagatggactttgagacatgggtagagctcacagcacttggcataatgttggcactaacattgcacatgaactcaattcctccctcttttgatctagaactctacttggaagcaggttcgggggctgagagagaaacttccccagggatctgcctgcccttttcaccactgcctaattcaggagggtagttggctgccagagttgtttcttgtgaattatttgtgtccagaccagagtccacccgctttgatagtcagctttttcccaaggtcttgtgatttgaattctctttggggaataagggcatgacacgagatatgttatccagggaggtgtgaaaaatgctccccaggtttaatttctgaagaaataaaccccatcttgctttcaattccgttttctgattgactaccttgttgattcactcagctatcattacccagcaccgactgtgtgccaggcattgaactaacctccactcactcactgtctaatacaggagcagatacataatattttagttcagcgtgatgagggcaatgatctaacaagaatattctccctgaatcagcagtcccagtaccctagttgagagacccacatggggctcatagaagtacagagaactggaccctccccgagcccaccactgcctaccacgcttaatcaaggccaattgctcttgagtgaagccatgtgcaaattagtagtcaaggtcattcttggggtgactacaaccttttttgcacatacttgtctccatcacagctttcaaaagaattatttttcatataaaaaaatctcttcccttgtagcctgggtttccaagggtaaagaaaatgaagcattctgtaaaccacttctttcatacaaatacgaggagctttcaagcggtagatttatggtctgtgtgtacactgttgcttagatcccaacagaaaaacaaaatgtaagctaatacatacacaggtaggagaaattcatatttcacatgatatcctaaagtgatacctggtaaaacatcattctacttcctttctgagtatcatctctgtgaatatctttgcagctgtttttatgagcttattggcaatcatgtgaccttttagtgtcaacaatgcaactttaactattgcttctgtaggtttgatctcttctctgtatttagaaagaaaccccggtaattccatcttgaaaaacattattttacactctttctgactggcggtgtgggactcatttagtttactaaggaggtgattgtattgttttggaaaatcccataaatgcttaaatggcttttatactgctgttcagccatggctttgaggaagtcaaatggattgactgaattcagtgaatagatgtagagagtaaggaagattaagggttcaggggtgaccctcaagtttctaatttgttggctgtgtgtggtgaagcccccagttgagagacagaatccaaaatcaggagcgatttggaggtgggaaaggtaatgaatgctattttaggtctgttgagttcgaggtgcccatggggcatccaaggatggtcagtgtctgtgagtcttctgtgagtgcatgagggtctaagatagaggggtggatctggaagttatccgcatatggtggcaattaaaactgaaagctaataaggtcattgtaggagttagagagcagtggggatggactgactttcgaggggcaagcaaaggaagagggtccccaaaaaggagagaaggcagtgctagagagacctcaggagagtgcagtcatatggaagggaagggaatagaatgttttaaagagaagggagtgtgctatggacgggatgtattctcccagagttcatatgttgaagccctaacccctaatgtgatagtatttggtgatgagaccttgggattcaaatttatttagatgaggcctttggcctttagatttagatgaggtcatgagggcagggttctcatggtggaattaatgcccctataagagagcagagaggtttctccctctctctctcttccaccatgtgaaaacgtggccatctgcaagccaggaagagagcccccacaaggaaccatatagacttctcagcctccagaaccatgagaaataaatttctgttgtttaagccatcaagctgatggcattttaaaaaatagcagccctagtagactgagacggagaattccaaagatacaaagaaatccagcgagattagaactgaacatggtatagaggtaatgtgtgactttgctgggagagtagttggagtaattggcaaaagcaaggtctgatttcatgggtaaaacagtgccaagtcttctggaaggatgtggacgaatagggaaggagagcaattacagagcagacagagggcaacaaataaacatgactgtttcggatgtcaggcttgtttagagtctgagaggaagtttccagcggagaaagacaaatggaaagtgttagggaaagaggaagactggattgaggggctggccttgtacaggggaaggtaggggatggctgtgagtgtagataggcatatgagggtgtagggataggaagctggtgttcatgtctgatggcgttcatgtctccatgaagcagaaggcagagtcatcactgacagtgagaagcaggggaaggcttcagtaggggctctatgagggcaaagaagtttagaataattgagatggtggagggagatgaatcttcctctccctcccccagaagatgagtaacagaattgcttaattcaggcaccaaattaagtttggagaacttgaatttataatgatctgattttctccagcaacccttggcttcagaagtggagaaaatggattgggtattgaccctgggtgtgcattttgcaggacaggtgaggcagacagatacatgtacaaggaaactgagcgttctggatagaagacaatccgatgaaagtgttccatctgagagaaaacaaaacaaaacagaaaacaggccaggatgcagctgagatgcaagatacatgatatgggaggcgtgtcaagggacagagacctctaagaggtagaagaagagaagtggaggaatccagggttgaaagcgtggccaatccgccagtgccagtggaactgaaaggctgagataaaacagaagtgatagagcaagcacctaggaggaaaacacaaagtgtgcagatgggctgtcagagggccagctcgctgggatcacccagaacaacatcaggaaatggtgcagaggaaggacaacaggctggaattcaagtggttagtgaatgagatggcaaggcgaggaggtgggcagtttaaactaaccagatgagccacagagtggcagacctggatgatgggagcatcaaaggaagagggatttttactcaatgggctctcagggtccaaaccatcatcagaggagtaaaatgggatcaggaggatgtctcagtggtgtgtgagtatgagaagagcagcccacaatgaagagggctgcagaaaagtcacggtccttagggagagttcctgctagtggtttaggacacaagggggtttgcttataatggaaggaaagttccagagaggtactaggatggaatagggatgggtaggctgggtatctattgaggggatccaggaggagaaaaagataaggtctgcaaaggatgaagggttggggagggagtttcccccacttttgtgagacagggtcttgctctgttgcccaggctagaatgcagcggcccaaacatggctcactgaagcctcaacctccaaagttcaagcaatattcccatcaatcctcccatctcagcctcctaagttactgggactactggtgtgcaccaccatgccaggctaattttttattttttgtagagacagggcctcgccatgttgcccaagctgattttgaactcctgagatcaagcaatcctcccgcctcagcctcccaaagtgctgggattacaggtaggagccaccatgcccagccaagagttgctcttttatggattccaagctgtacaggatgagagacatgataggaatgtcctcaaatgccttgactgcggcacaagccagtttagttttagagtccctgaaaaccctaggggtggattatttagcctcagaagaggcaaggcttccccacatgctcagaatggtgatgggagctcccaggctacagaaagatgatggaggtactaacttctctcatctgtcatgggtttgaaatgctctccctcatgtagaatctcacacaatgctcatacagcctgttgatttatgccattcagggataatgaccatcaggctgtgagacctcaacagcagttaatgcccaaagtaaggaaaaggagatttggggccaggagacaaagctgggtgtacccacaattttgctgaggcttcaccataagcacattcatccaagacatctcagcatagcatacgggataaacacagggactgggtctgacctgcatttaaaacctggatctaccactttccatgagcaaattcttggctctttgaggttcatttttctcatgggtataaaatggggctttcagggataaagcaatgcatcatttatagttcctagctaatggtaggtgtaaaattaaagatttatcttctgatttctcaaagaactaaaaatagaactaccattcaacttggcaattccattgctgggtaaataccaaaaggaaaataaatcgctctaccaaaaagacacttgcagttgtatgttcaccgcagcactattcataatagcaaacatgtgaagtcaacctaagtgcccgtcagtggtgaattagataaagaaaatgtggcacatatacacaatggaatattatgcaaccacagaaaaaaataaaatcatgtcctttgcagcaacatggatgcagctggaggtcattatcctaagtaaattaattcagaaacagaaaaatgaaatatcatatgttctcacttataagtgggagctaaatcttgggtacatacggacataaagatgggaaccatagacactggggactccaaaagaagagggggagggagagagcaagggctggaaaacttcctattgggtactatgtttgctatctggctgatgggatcaatagaagcctaaatctcagcatcacacaatatacccttgtaacaaacctgcacatgtacctcctgaatgtaaaatagaaatggaaattgggcaggtgtgatggctcatgcctgtaatcccagcattttgggaggccaaggtgggtggatcacctgaggcggggagttcgagaccagcctggccaacatggtgaaaccccatctctactaaaaatacaaaaattagccaggtgtggtggcaggtgcctgtagtcccagctatttgggaggctgaggtggaagaattgcttgaacctggaggcagaggttgcagtaagccaagattgcgccactgtactccatcctgggcgacagagtgagactctgtctcaaaaaagaaaaaaaaggaaattaaaaaaaattctctccccttgctatccagatactacttatttatgaggccctgagaagctgcctaaatgttaccctggattattcaccaaaggtctctgcctacctataaggtggcttgggaggaagtatctgcagctaatgccttctaaacaaacattttctgccttttgtgtttcccgctcattggcctcgcccagggcatggggagatctatgtggggtttaatgaatgattgcactttacaggatttagctcacactataaataggacctacatttcagtggtgggatttataaactgcgggtggtaggctgcaggaggattggcatgactgtaggatttgtctaaaacaccaagtgagtgagtgagtaaaaatagccaccaaggaacctgtctggcccaggacacattaatcagtttgctggagccttgtccggcattgccccaggggctgggcaggagctgacttgagtggagccttttaggatcaggaagtgacctggtgccaggcggggaaatgacattcctcagcaatcagctgtcctggtcctgggtgggcaaggaagtaaggcgtttttctccatggaggctattggcccaataccatctctaaagccaaaagctaaacatgatcaaatatggctggatgtggagtgaagttctaaattttaaaaaatcttatgagaagaaaataaagctcagtaatttcatcccacaggttagaaccaggctcctggaggtgcgccaaaccccaggtcttattctttccccagtgtggagggactttggggagttgtcatccccccagggaggtcccagtttggacatgggaacaggaggtgtcttagtcctttcctgctgctataacaaaataccttagataggataatttataaacaatagaaatttatttttcatagttctggaggctgggaagtccaagatcaaggtgctggcaggcttggtgtctggtaagggagggttgctctctttgctcccaagatagtgccttgttaccgcgtcctcacgtagcagaaggtggaagctggaggcaactctctcaagcctcttttgtaagggcattaatcccgttccatgagggtggagcccttataatcagtcacttcccagaagcctcctcctaataccatcaccttggtgattaggttttaacctatgaattttggagggacacatacattcaaatcattgcaggtggtttggagaaaggtgatacggagcccatccctgcccacacgaggtgctcacagctattccaaccacacttggggctgttcattgagccaggactggaaggagatgatggtttggaccctgtgagcccaacttctgctgtccacagcaggcaggaaaagagagactattaccaaatcatggaagataggatattggacaagcagccccagagagatgggctgaaacaggccactcagcaattccttgctaagacttacagatagccacgtactggtggctgttccagatatcttctctcttattcagcccattcagggctataccaccttgaaaaagtcattcctctggagccaggcagagtggggccaaaaggagtggtaactctaccaggaaaactttgcatgcataagttgaccagtagtctccttgtaaaggaaatggaatccaagatggcatggttttgaatggtgtggtatgatgagggatattagtagatgcagaaatatctggaatacaatgcctgactcatcgttggcactccatgaatgttggttgaatatgcattgcaatttgtgtaatgaagggctttctatctttctttttttctcgttttctattcttggtctgttcacatgaaatatttaacttggatctctagtctaaaattaaaagctcaggttagaacaagtttgcagaaatgaatcacatgcactcaagcagttcttgcttagaatggttgaccacagaaagaaatcaccactcatgaacatgattcaaggtcacaataaattgtttttctttgtttctgtcccattgatgatggcccttgtttctagggaaaggactaccctggggtttcccaccaactgtggctttttattcctccctagtcactcatatttatgaatcccaaattccaggcatcaccaaataattgtctttgtcactttatactgcatgctgtggtttgactatttgtctcttccaaaagtcatgttgaaatctaattgccattataacagtattaagaggtattaagagacctttgagcggtgattagtctgccttcatgggtggaattaatgccattataaaagggggagtttggtccccttttgtcgctttgcccttctgccttccaccatctgatgatgcagcaagaaggcccttgcaagatgcctgtgccttgattgtaacctccccgccaccagaactctgaaataatagatttctgttccttacaaattacctggtcttcagtgttctgtaacagcagcacaaaatggactgagatgttgcacatggctttataacctgatgatttttcctgaaatcaagtgtttccaagaagtcttgaacagggagaaatggttgtggggaggagagaatgaggcagtggctgggagacccatgtcacactcaatagatcatctctattttccttggttgtaggagtggggtcactgtgagggtctgttgcaaaccacattggacagctgggatgggttatttttaatggtgagagaggaagaacttccaaagatagagttcacgcccacactctgctgtgccagtttagacttgggggtggctggcaaaatgggccggcagtcctaagccagaacaaacaagtctccagggccaacccaggtgagggctttgggtggtggcaggttccataatgcacatggaacgagctccatagggttctgcgttcagttccttctttttcaatgggatttacagcaggaaggacacatttcctttcttatttagtcttttttctacccaactcctgacctttccctccctccagtgaccctgataacttttcccatccctctcgccgctaatggcaaccactggcttcacagcacagggtggggtggatgagtggaattcatgtttggaagcagttacacataaacagagtaggcagcccttacggagtgtggctttaaaatctaaaaagtctgtgcattccccaaacttggccctgcacagactggcatgctgcctgcaattcccccataagaatgaagcatttctacagaaagcccgtgtgaacatgcagacctgagacctgaagtggcagtgccttctctgggagcagtggtgagctgagacctgggatcagccttggttagtcaaaggtttcctgtgctgagtgctgtgtgctacaggtctgaagacccctgttcaggtgttttctgtccctcttcagcctgcttcccaccctctggaggggctctaacaaacacattcacacagaggggaaatgaccctgagaccctctcctaggggcctttgcatctcagcagatgttcagggcataggagatgctctcatgcaggatttgtaggaccatcagagaggtgggggaagaatttttggtgctattgtttggggagatccagccagagggaccctgacttctttgcttaggtttaaaggctgtctcttttggtgtcccaggcaggatggaaccctggaaggcaaaccttagcataattcaatcttgagtgagtgagtgagtgtgtgtgtttaatagatagaatttaatttttggagcagatttaggctcacagaagaattaagaggaggaagcagagattgtgtgtataatagagtccagagtctttattggagttccattacttaggcatggtggattgtctacatggctgatgtcaatttctagtccctcaggaagtcaatctcatactgggtgacctaaaactccaccctaaatcacattttttgccatctggctggtctaagtctccccaccccaaccccagcaagcaaagacactcctatcaggtatgacattctaaggggttggagatcacctccaagagcctagggtaatggtcacacctccctttaggcaagattaaattctttaccacacaataatagtcacgtaatgttttaaagctataatttttattcacctgtgaaaagagaacaaacactggcagtcttcagagacatcattgtagttaaaggatacatatttaaaaaacttagccgctgatattgttattttcctttatagaggaatgagtctcggctattaattggcagagttggcatctaagtttatcatcatattttaaacctcaatctctgtttccacccctcctccctcttagtgtcactgtgtctctatctaggcacttgctggcagctgcatgccctgtgtctgttgttctgacaaaggaaacaggtttcactgtttgggactcagtgtgtgcctcccctgtattcacatatttaaaattactcttctaaatgaattatttaaacaactcactgagcaaaaaaagaaatcataataatattgaaaagatggtttaaaaacctgaactataaccaaaaaaatcaaatatcaacacttacagatgcagctaaagaagtatagtaaatgaagagttaatattttaaatgcttatgttaagaaagaagaaaggctaggacttaacgaacttagcatgaacttaagaagttattttaaaaagaaaaataaatgcaaagaagtagaagaaatgaaacatcaagttaaaaataaaaatccaaaatctagtaaatgttttataatttagggcattaataaaactaaaagttggttctttgaaaatattaataggcaaatatctggctagatcaatcaataaaaatgcaaaaaccaaataaagtaatattagaaagaaaagaggaaaaactacaacagatgtaaaaaaactaaaaacataggaagagagtataaggaataactttttaaatcataaattagaaaatagatatgaaatggataaattcttttaaaaataccacttaataaaatggacctgagaggaaatagataagtattttataactacaccttgaagaaactgaattagtagtttaaaatttttcttcaaaaatatactagactctgatggtttcaaagtcaaattctatcaagcatttaagtaatggataatttcaaacatatgcaaactatttcagatcatagggaaataaagaatattttccaatgaattttatgacatgggtgtaactttgatacccatagcaggcaagacataaggaaagaaaaattattgactaatctcacttgtgaacttatttgcaaggtattaaaaaattaccaagttcaactcaagaaaatattatcatgaccaagttggtttgatcccaggaatacaagaaagtttaacattagaaaagccaataacagattaaaggataaagaccaagtgatgatctcgatacatgcaggaaaggtaactgataaaattacatatctattcatgattaaaagctctcagaaaactagaaatagagaaaacttccttaacctgacataaagcatctataaactggcaaaataagtatgtcatctctctccctttctgttcatcattgttctgggagtcttagctagtgaagtaacccaagaaaaagaaatacaaagtataaaactaaaatggaagacacaggacattttatacattgtatataacattgtttatgtgggaaaactttaccaagagatataaaagaaaagtttgataaattagggggatataaaatgttctagtatgggaggataatattgtaaggactcaaattctacccaaattaatctctaacatctgtttaataatttttctttcttgagacttccatagaattacctaaaggtcttttagaagaacatcaagaaagaatagccaagaaaaaaagttaagaattctaaagatttcatttatcctgcaaattaagaaaaattataaaaaccttgtaatttaaatactttgttcctggaataatagacagaaatagcaaggtagccaaataaaatgattaaatgagctaatcaaaagcataaaaggagacattcacagttgtgagggagaatacagtttggggacctgggtttatttggaaatgatattaaagttttacctcataaaatatgttattatgtgaaaaaaaattaaaaaataatttgtagagtataatctcatttttataaaaatagttaaaattaaatttgtacacatacaatcacagagactctaagaataaaagaaaataggttggggtgcagtggctaatgcctataatcccagcactttgggaggcctaggagggtgaatcacttgaggccaggagtttgagactagcctggccaacatgctgaagcctcgtttctactaaaattacaaaaattagccaggtgtggtggcgggcacctgtagtcccagctactctggaggctgaggtgggataattgcttgaacccaggaggtggaggttgcagtgagccaagattgcaccactgcactccagcctgggcaacagagcaagactcctcaaaaaaaaaaaaaaaaaaaaaagcaaatagttaatgctgttatctctgaatagtggccataggttatttttattttctactctttgtttacaactttccaatttttttagaaaatcttgatttttaaaaacttaccaaaaataccaatttgaggtatggccttgtctctgtcatgttttgggcatggtttagacagagttgccttgtctgaatattggctgattaaaaaacttgccttcctggttagttatttccaggtaatgtaaatgtaagtacttctagcatatacactgagagatttttaaaaacattccaaatatctggaattcactttttcatttgtatcataaagacattaaatatgaaattgtggtccccaaatttatttaaatactcttctaaaaatacttgcactacattattttaaacagttaacaacaaaaccatcaatggattttcatgcaaaacaacaatcagttatgcttcagttatatagaaatgtatctattcaaaatagcctattccccaaccgtgtcggaccaaccaggattaccacctgcggttacacacacgctttctttccaccactttttctaaattgctgcatggctttacaaagttattttttcaagctgaaattttccattcttggtcctctaccaaaggtgatttcacttggaaaagattgaaaaaatgtatagcccaaagtgttcagtcatttttgcagttctgtaaggccgaagaaaaatactctctctatttgaaaaccaatttaaaaggcttttctcttacgcaacagtaactctaagtggcttgtctggggagatttaatagttgcaacccaccagtacccaaacagcagttttatctttagaaatagcctgttgttgacctcaatgctctgctttctttattccttcctttttgcagtttttctaaaagagaaagtatagtgtagtgagcagtgctagaagctggagttagaagctgcttctgagttggagtgttaaaatgcactatctgaccttgcacataccacgcgaagtctggtgtgtgttttgcagaaggaaaatggttcttacccctgctggccatggtgagcataataggagacacatataagaaagctcactggatctggccaagctctgtgaaatgaaagcgagtcacactgtgaggccaaccacctgaaaggtgtcccggcatccgtctaatggctggcttaggctgaaaaccctgtgtaagcagcatttgccttgtattatgaaaaacaataaagataaaccagtaaaataaactcctcaggaacagagtacagtgagcattacattggaggttactcttaatgggtggttcaactttatttgactgaacctcacttagatggtgtgacagtccccaggctgttgtatatagtcacacaggttgtgcactgcaaaattctagggggtctgccttcccgatcccatttgccagtggagaagagcactgactgagaatcggagagggaagaaaacgcagttgcaatatgaatgtatacaaaattttacattagaaaatgatgctctagacccttaaaaataacacagtaattttattagacataccttgggatttgattgcaagttattctaataagacaagttcaagggaagcacagctaataaagtgatactgagcaagtaaattcagagggagttacatagatatctgctttaacaataagaaaatggatatcttgttactccaaatgcatatgtatcttaaggcctgatagctgacaacagtgggcccaaaccacttgtgatgaaaatatgtacctgtcactacctacggtagggttaagcaaacagatagataattaaataaaaccaagaaaaacgtgaaactataaggcaagaagtgccttaatttgaaactctaaccaactcaaggcaataataataaccagacatttacatattgcctactgggtgctgggcactagtctctacattttgcagatattaacatctttaggccctacaatactctatgaggtgggtattattttctctgttttacaggtgaagacgctaagacacagagaggttaaacagtagcattgctgggtttcttccatggccacccagtagtattaatatcatgccctttgccctgtaactttgtagtccccacccattctgaatattgggctggtctcatgacttgctttgtttaatggaatacagcagaagtgagaacaagcctgggctagtctactggaagatgaaggaggtgaaggagagccaagaggcagccaagcccactgaagctgagccactcaattcttaatcacccccagcactgaggatgcagagaacagagtgcccctgatgcctacgtgggaggaactctgcaatcacaaagtgtgagccatatttcagagaacaccaaatctgaatcctcagaacaacctagtcacacattagaatactaggaggccaagtactggtcattagcccttattcatacattaaaatgtttagaattatgcatcagttgcttataagaactggggccagttctacagaaagtgctggaaacttggtgactgggtgtctttgtaatttttatccagtaggtaaatggattgaagcagtttcagagagttgtcattggtaaagaaacaatggttactcctatcagtgagaaaagcaaaaataaaaagagagtctttattttggtggttgaggtatggctttgtctctgtcgagttttaggcgtggtcacagagtagccttttctgattattgcttatattctgtgaaagttatttatgttcagttgggaacattttgcttcagcctagttgttagctgttggctgccagctgttggaaccatttttaccttctcacaatcactttgtgacccatagggaggtctctgataaaaccaggaagtggcctgagagcagtgcattctggggttgattgtatgcaggtattgcctcagtggtccagagaaccaggtaggaggatgaataactgtgggagcaaaagggagaggttactgggaatggggaatttgatcaggagcctacacagcaaccttacccttggctatggttctgagaggtggcctcaaatgccaaagaagtgagtggtaggaaagatgtagactacctgtggagagaaagggagtcaagccggccagggaagagggaaatgggacctatgggaaaagttgagcaaaactccaaaaggaagtggtatgtccagaagatgcaggggacaggcctgctctcaaagtggtcaccagcagtatcctgaggacatttttcagaaaccttgtggcattcccagcaatgtgcataaaagcagggcttgtactacattggtgcaaaagtaattgtggtttttgccattatgcaccaaccaaatacatatcgggaacaaaaatcacaagattataggcaattattcaaagacacctggatgagaaaagtagacatgtacaagattggaaaggatgtaaagaaaagagataactccacaaatgctgaacttaaaatcacatttgaagatagtaaagcactcacttgttgaggtaggaacatgcctaagtgacatactatgcaaatctgagtatgcagggaaaagacagtgagatgaaaatggtgagagagaatatgatagaaatagagaatggagaatagaaaacccaaacaccaaaaatcctcaagggaagatcaaaacaaatgcaggtgaaatcagtgcctcacgttttctattatactgtttccgtcattttgatttttctgaaattaagatgcatcttatgttttaaattttgcctgtcattccctcctgcccaaaagtagtcagtgatgtactttttcaattaattttgtattagaacaaagaaaatacgttaagagaagaaaattcccttagagaaagattcaagttacgcagattgaaagactcacttgggttctaaggcatgttaatggaaaatgccctaaattaaggacttcttggcaaaaacttttaactcttggagaaaaaaattctacaagttgccaggcctaaatatcagattacacaaaaaaagaataaatgctgggctgtcttttgactgctctccaacaccaagggttgaaagttcacagaggttaaaagttgtggcccaggaatttttcactcagccaagttgttcatgtttaatagctataaaaagacattgccagaacatactaggtgtatcagtcagagttctccagagaaacagaaccaatagaatatatatataaacagaaacaatagaatatatatatattataagtatatatattctattaggaacaatagaatatatatatactattatatataatagaaactacaatatattataatagatcttttatatataataaaaatttatgtctctcagaatatattctattatatgtaatagaaactactatatattataatatataatatatattttatataatagaaatctatatatttatatttacatattcatattacataatatatttctatatataatagaaatatgtatataatctctctatatatactatatcaaagtttctatgcagctaaatatatatgcctgtgtgtgtgtatatatgtatgtgtgtatatatatatagagagaaagagatttattttaacgaattagtaatttagaaggaaaaacagataagttaacaacataaaattgaatgaaactagagctacatgaaagaacatgtagcctcctaaattcctcctaaattgtttattttaaggaattgtctcatgtgatcatgaggctggcaagtctgaaatctgcctgcaatctagaaactcagaccgggttcctgttgctgatggaggccgacttcctttttctcagggaaacctcagtttttgctcttaatggcttcaactgattggatgagccccacccacattatggaaggcaatctgctttacttaaaatcaactaattgtaaataatcacatctacaaaatgcctttacatctagactggtgttcgatgaaacaatgaggcaccatagcctagccaaatggacacataaatttgtccatcacataaggattcacaaaatatgctggcatttaaaaaaaacaaatttcttggttgggcgtggtggctcatgcctgtaatcccacctacttgggaggctgaggtaggagaactgcttgaacctgggaggtggaggttgcagtgaggcgagatcacatcattgcactctagcctgggtgacaagagtgaaactctgtctcaaaaaaaaaaaaaaaaaaaaaattcttgaagacatttcctgaatacaaaatataaaactaagaaaacaatggttaaaaaaatgactattggtgacaccgaaaccaattaaagtaaaaatgtggagactgtacatctgtttttaaaattaaatgaaaaagccaaaaatactcttgaaatgtaagtactctaatgttaaaaatagtatagtaactataatttatatatagaaccccagattatattaacaaagaaaatagaggaaaaagaaaatgaaggttttatctaaagatgtgggaataaaaaagtactaatttatgtgcttgactctgaaagttgttgggaaaacataatttaaacaatgatttcaaaatagtaaattaacaactagtagaattttaaaaattatatattatcttccaaaacactgaagaaagtagactcttactctactagcttgtggaaacccagccaggtaactatcatttgagtcctttgtccctgcatcagtaattcacacctggtaatatgtaacacttggttcttagcccctggctgtgcattagaatcacctagggtgcttgtaaacatcctgattcccaggtgatgtcccagaccagttgcatcagaatctcttgggatgtggcccagtcaccagttgtttctagagctcctctgatgattccaaatttgtgcagccaagtttgagaaccactggccaaggcctttgccctttctcatgtttctttgggaagggctgtctactttagcataaaatgtacatagttacctgcccctccacctttcctctgagtcacctttccagtgatccttggttatcttggttacaatctacagctccttactcacagcatggcccaaggacccagcagcctcaaaatctcttgcgagcttcttaggaatgcacctgttccatggctgtcttcctcagtggccttcttgcctcctaatcttccttctcaaaacttctaatagaatgatctttgcaaaacgcaaatccaatcatgacataacttcctcaatgaataatcagaaactccatgtgaaaccacctttgacagtgaaagagatcagacctaaccaactccatcttccttcttacctttaagctgtccttgttcattcctgagcatagaccaaactaactttgggaaggaatttagtttatggtgtgactgaaacaaagttgataataaccctttcccaaaaagacccccttcttgcctggggaccaatctgcctttgtaggactaacaaaatagctacaagattagaaattgcagcttaggagtcatgaagcctctggctgcaagagtttgaacctccccaaattgctcctggggataacatcgctattgtaaaacataagatcagtgcttgagatattttgtagaccctgtacttgatggatcagctgacaccaccaataccagtaatctggctcaaccggttctgcgatcccacccaggaacagaaggcagcaagaaaacctcactttgaccactatgattccatctcaaacctgaccaatcagcactccccacttcccaagcccctacccatcaatttatctttaaaaactctgattctcgagtgctcagggagactgatttgagtagtaatataactccagtctccctcacagctggctctgcatgaattactctttctccattgcaattcccctgtcttgataagttggctttgtctaggcagcggacaaggtgaaccctttcggctgttacacatgtttcctctgttgtaaaatctaaggtcctgaaaattaaattcagggttctctaaggatttagcctctttatcttgtcccaaattttcttctcagctatatttcccactttcctaactccaaatacatcaggccattagccattcacccaatgggataggcctttttactcttcagttcttgggctaatgttctcttcagctgtgaatgcctcgtcccccatttcccattaattcttagtcttttcttggagttcaacacagatgccacctctgtggggaagccttccccaatctcccagtcaaaagggatatcacatgcaaatcaaaatcacaatgagattccatctcacaccagtcagaatggctattattaaaaaagtcaaaaaacagatgctggggaggttgtgaagaaaaggaaacacttatacactgttgctgggagtgtaaattagttcaaccattgtgtaagacagtgtggtgattcctcaaagatctaaagacagaaataccattccacccagcaatcccattactgggtatataccccaaagaatataaatttttctattataaagacacgtgcatgggcatgttcattacagcactattcaaaatagtaaagacattgaatcaacccaaatgcccaacggtagactggataaagaaaatgtggtacatatcagccatggaatactatgcagccataaaaaagaataagatcatgttctttgcaggtacatggatggaggtggaggccattatccttagcaaattaacacaggaagaaaaccaaatactgcgtgttctcacttgtaagtgggagctaaatgacgagaacacatggacacatagaggggaacaacatacactagggcctatcagaaggtggagggtaggaggagggagaggatcaggaaaaataatgggtactaggcttaatacctggtgatgcaataatctgtacaacaaacccccatgacacaaatgtaacctatgtaacaaacctgcacatgtacccttgaacttaaaattcaaacaactataaaaaaggggtttcactttgttctttcatgtagccctggtttcattcaattttatgttgttaacttgtctgtttttcctcctcaactgataattctttgaggggaggaactatgcccttttgttcccattccctaatcagccagccagtgcttgtagaacaaatgtcatgggtcacactctcaatgcctgtaggtgaattcttttagcaggatcaactctccccacattccatgggtactgcagggggcaggcccagcccacactatttcagcataagtgagtatttattgcaaagactctcctaaccttggcctattaagtaactccttgatattttagggaatttctgtgctctcacatcatcttcatctttcatttcgcactggtggagtgcctgccctctcctaacactttcttcattttaccttcattgacgcttcctttttgggggactggtttgttccaggtgaactcaaagaatgagtcaactttactaggacagtgactcaccttcttttaaatctgaggacaatattggaagctcaaacaaagtgtctaaacaatttcctaggagcatttgcttgaggagggggtgtgtaatttcagcatcaactgaagaaaacatctgagctttttgacagcttctaaagagaataagactctctgcctgcctggagatgcactcaaaagacaaggcatttaacagcaaatcaaggctgtcctgcccaggaatcatcctaatcatacagtcacagattcttgcaagggtcactgcagcccaggtccctgacaggccagcacataacccaagcagtccagctgtgactgccaggtgtcaagtgcctgtactgaacacattgaaaggagataaacagaggtgacttgggaagtggcaaagccctagatgaaagcaatctatgaggacaatatatttttccaaatgtttttgcctctctgcataatccaatccaaatattctactcctttctgttctctcctccctgtaggtatgttgtttactattgtggtttagtaatgttttttatttgtccagagaccccaggccaatttcccaagcactagaagccagattctacattcaccctcttgatcaagtccctcctctgtgctgtaccatgggaataaaccaaaagggaagaagatatgtgataccagaatagagaatacaacccagaagaaaggcaaaggaaatttgaatatgacaataaaaagaaatcttagggttacagcttctcatcaggcctaacaggccaccaactccgaggagagtagaatggaggttcccagaaagcatgtctctaagaaaaaagtagaaacaacagtttacatgatgtgattggccttgtagaaaatcacactgagaggaagttgtggggagagttagcaagagtaaaaagaagtctaagcaaatcaaaagcaaggcaattattaactttaggaaaaacaaaaagtaagaaaagagacatcattgtagtatgttacaatactcagctgtgaattatatttgtataagcataacactgtaaacacagaataaaatttagcccaaatagtgatattaagagaatgaaggatgggaagcagagggaacagcattgaaattattgcagtgtgattttaatttagatgtcttatattacaagtaaagtgattccaaagtaaacctgaaaaactagttcagaccatgatgggaagagggggttggacataccttgttgtactcacctccctttggaattcaggcacaactgaccagcattaacatttaaaatagagatcctaagactgataaaaacagactttttgtggcaatgagataccaaatgccaactagcataacatcacatgacacatagcaggccttgaaagaaattgaagtattttacctccaaatatatttatttgatatatttgaaatggccctgtaaagatatctcttatggggaaagtctacattttgtagagaatcccattccctttccaggtattttcctgatttaggagagatttaactcctaagagtttggcaccttttaaggtctgataagagacatgtaccatctattctctctgacacctgctacctggaggcttatctatataacaagaacccttggcttccacagcccctattatcttaaccctaagcatttctttctactaatttgaatacttcaggcaaaacctgactctctcaaccagttgccaatcaagaaatctttgaattcacctatgacctagaagcccctcaaagctttgaaatgttccaccttttcatgctgaaccaatgtaaatcttatgcgtgtggatttatgtatttgcctgtaacttctgtctccctaaaatgcaaaaaatcaagttgtaaccaaaccaccaaggccaaatgttctcaagatgttctgagatgaagtcacagatcacggtcctcacatttggcttggaataagcctctttaaatattttacagagtttgacccttttttgtagacattgagcatcttttcatattttaataggccaccttttatttcttaatctgtaaattgtcttcattttttgaaatcaaatttttattggcttgttgcattattctttcttaatttccagtagctttttctatattaagattaggcatttctctatgagttgcaatttggggagcattttttcatttgtcttttgactttttatgtggtattttggtcatgtgacagctttgtattattaatttaacacaatttatcaaagctttattttataactgtgaacttttgcattatttttagacaatctttcctactctaatgtaaaataacctatcttttcttcttaattattttattttattttttacatttatattattttggaacgtgtagtagagatatggatccagctttatctttcatcacatggttcctcaattgttccaatacacttttggaaaaaaaaatctttatatatttgagatgccacctttatcatatactaaattcccatgtgtatctggattcatttcaaggcttatatttctattccatgtatccatctttctatccatgaaccagtagcacatcattgtagttaattgaagtttgaccatacttttaattcctggtagagccagaccttttcagaatcttcttggctccttttgcttatttttccaaatcaactttagaactagtttgtctagttctagggaaaaaatacccggtaagctgttagtatttttaaaagaatcatattaattaaatattaaattaattctaaaataattaaattaataaaattaaattaatataaatttaatatgattccaataaactaatgaggggaaatgactcattagatgttgaatattcctatgcaaggacatagtatatcattccaaaaaggtgacaattatcaaaaagacataatactttgaatttctatgtacctaagtaccaaatgatacagtttgataaagcaaaagtacaggagctacaaagagaaagaaacaggaacacactaacaataggggattttaatttaacattcttggtccaagaaagatcaagtggacaaaaattaactaaggaaaataagcaacgaggtagatataggtggaactctgcatcctaataacaataagtgcatcttcttgacaaaagcacatgatcattgatgataactgaccccatattagccaccagaaaagctcaatgaatttgaagaagcaagtataatacaggcaatgatctccaatcacatcatcacattgcaatgaaactagaaattaataacatcagaaaaaaactgggaattaaaataaaacccttatttttgctatttaaattgcagtctgtaaacagcagcatctgtttctcttgtgagcttgttagtaatgcagaatcctgggtgccccaggtcttagttggcgtctacattttataagatacccagataatttgcaagtacatttatgtttactcattgtttccagaaaacaatgagaaataaaatacacatcagaactgtgagacataagcagagcagagctcagaaaaattttagtcttaaatacttatatcaacaaaattaaaactaagtaaatcaatgcattaagtatctaactttattttattttattttattttattttatttatttatttattttgggacggagtttcgctcttgttgcccaggctggagtgcaatggcgcgatcttggctcaccgcaacctctgcctcccaggttcaagcgattctcctgcctcagcctccctagtagctgggattacaggtgtgggccaccacacctggcttattttgtatttttagtagagacagggtttctccatgttggtcaggctggtcgcaaactcccgactcagatgatccgcccgccttggcctgccaaagtgctaggattacaggcatgagccaccgtgcccggccaagtatctaactttaaaaaatagggagaaaacacaaaataaactaaaagaagaaggaagaattttatagtgatggaagcaaaaatcaatgcattagaagaattgtagaattaacaaattaggatctatttctcttaaaaaatgaatgaaatagattgacaagcagtaaatttaatcaagcaaaagggaggaagcacaaacaataagaaaaggcaaaagaaaataacctcaacaacttaataattttaaaaaataaggctatttgtacaattctatacaagtaggttttcaatatgcaaatgtgaatgaaattctaaaacttggatgtaataaataattttcttggaagatataatttactaaaattaattccagaagaaacacaatgattacatgaaacaaaactatatggacaagttttcattagagaaataaagtatttaaagaataagcctccatcaactcatagaacatatatatcagcccagatagtttcacataagaattattactaagcttccataggataggttattacaatgctatttgaacttttccaggacatataaaaagttgcaaaattttttatataaggtggataacgttgacaccaacatgtaacaaaaattgtacaaaaaaacctacatgttaatctcacttgcaaatatacatattacagttgtaaatataacaacagcaattagattcaaacagctcattaaaagactagtagcaggaccacaaagtttccatttcagaaatgccaggatagattagtattaggaaaggtattcattacaagtcagcatatgatatggtttcactttgtgtccccacccaaatctcatctccatttgtaatccccaggtattgagggagggacctggtgggaggtgattgaatcatggcaacagtttcccccatgctgttctcttgatagtgaggaagttctcatgagagctgatgttttgaaagtgtttggaagttcccccttgccctagtctctcctgctgccgtgtaagacttgtcttgcttccccttctgccatgattgcaagtttcctgaggcctccccagccatgtggaactgtgactcaattaagcctctttcctttataaattacccagtcttgggtattttttatagcagtgtgaaaacagactaatacaacatattaatagattttaggagaaaatttttaacatattgatgctgaaaaggcatttgacccattcttaaaacactttttaaaaagaaatttgtaaacagtagaattaggaacacagtaaggatgctcattattaccttttccatttaatattgtgctggaagtatttgccacttttattggacaaaagcatgatacttcatttataaacactgggaaaaagaaggttaaattctccctatttgtggataatatggcctggaaaatctaaaagaatcgactgaaaatctttacaaacaaaaagagactgcagcaaataaatgggctataaaaattaatacgtaggaatctatagctttcatatataacaacagcaatgagttggaaaatgtagtggcatagatgcttttgtttttattagcaacagaaaatataaatatctaaatataaacttcacaagaatcatgtaaacttacatgaggaaaagtttaaaacactcctgaaacacaccaagagcggacatggagtcttcattctaacaatctgtgtattggtttgaataattcaatacccaatgtctttaattatctaaccatggttaaggcactcccttgccaaagattttagggatggatgtgtgacccgttgctggccattgagatgtgaggcaatatctgctggcatagggcaaaagtctctcacccttaaatggaaccccaaggaagatgcagactcttcctttctgcagatcttatcatgtctggatatgatgcctgaaactgccacagttactttgcaaccatgcccagggccagcacggtcaggatgctaagtggagacctggtaggaactgggcttcttggtgacatcctcgaggcattgattatgtgctgcttggagccaccaacctgtggacttcctgataacataaggtaatatatttccttaatgtttcaattaatttcaagcagatttttctgtttcttgctgccaaagcattctagctggcccaatctgtctattccatccccagaaccagttttaattgccattgctttataatgtttcagcctacaatcaccttctttggggtgagagaataattctttaactttcttaatttcttccttaagtgatttaaccatgtgattccaattgagtcaattctagtcatctaaatttcttaatacaatttccatcttaaatgattttcaaaataaaagcacttaattatactgtaatttttaaaaacttttatataagttctagccatttttttctttccttttttcattttgattatggcattttaaaattagattttccagcagctgggccattttactgattcttttcaaagacgttctctgagattcactatctattcatgccattgtgcgttttcctgctgctaattttactttttgtttttatattttaatatatttatttctgcttcctttgttccttttttcttcactttttagttgaaattattttctcttgcttttacttttaaaaatgtaacatgcatttaatactacaatttattgagaacaactttacgcatattccataatcttaaatgtgaattattctgattctcattatttttcaattagctgttttcaaatccctttatttcctcattaatcagaaatttattcaaaagagtattcataaaatttgtttaatcttttgttgttgtttccagttgttatactttcctttgagaacatagattgcatatattcatctttctgacttatgatttttgttattatttttctcatgcctgactacatttttcaatactttttaatatcctgtggctaattagcaggaaactgtattttgcaacgcaaatacaatatgctttataagataaataataactgcataagacaaagtttgaaatagttattaattatagtttactaattatattgtttcaatcattcatgtcatcatttttatatactttatgatgacaaatatgaaagtttgaggaattagtgttgggaaattctaagggtagaacccatagttaggcttaggcctaagagtagtggagtggctgtgcatgaccacagatttgttgtgatgggaatttgcaggagggaggaagctgcttgtgaatggcaaaaaaacacaaagtactataactactgtgtttaacggccctgctgggagaacagaggagctgctcagtaactgtttgctccatgaaataataaattttttccccctcaaactgtttggttgaaaaatgggctatgccaaaggcagtgaagttaattatccccaggagaggcaggctaggtaagaaaagatggccctggggaccatgttggattgccctgagttgctggatgttccaggaggagggaagagatgatttagcttgagcttttcaaacatgttttgtttgtttgttttgcttcaaggatccagaaagtgggatttttttttaaatcccagaagttattttacggggattggtgtgcattggacaaacagcatgaagaaccaggagcagacactggccctgtccatagcacttaggccttactacttcacagagccccttcccactcttgactgccagtatctctattctgtgtgagggttctctctaaattccctgaaggccactctacccacactcatcgtagggcagctgcaagggctggtatcaactcttctgggagcagacctcaaccatggtctgcccagaactactgtacagctatcctagatcttctgcttcttgggtgagaaaactctaaggcatgtgctctacacttgcaatcagaggtctccactagagatgaagctctggttgccctttgtagtagctgtcctaagaatgaaccctttactggctcccttcccatccctgtctcactgcctcacttcaatgctggtgttctctgcaccttccaaattcacaacttgcacttgaaaccttgtctcaaggtcttcttctgggaaaaactaaattaagacaaataataatttttattatttgttttagcctcatcaatctttgtaaacaagcattgctgggagaggaaggtgaaaaatgttcaagctaagatgtcatgcttggctgcctccaagagtatttgaaaatgtcattcaagtcgtttatcacactgtgcttgaagaggccaactatgggttctgcgttagaatttcccaacaccaattcctcaaaagccctaactcagtcaactggctgtactgagaccaatgagcaatcttccagccattagttaccacgaataatattaaattacaattcctcctgcagttgtaactttctcctggactaactggttgagaagataaataggctttctcaggccaactaggagggagtcccagccatgggcacaaagatatgtttattacaattatgatcatggctgttttcagagaggcagaggctagatttaaagtaataataataataatactgtccagaaattattgtggtgtagaagatcctgcatcttcttccaggaggccttacctgagactctcatctggactttgtgttcttcttccgtgagcccatgctgccttatctttcccacattatggtccttaacctattaaattttaatgagtattttatttatctaaaccccgagcatacttgaaagcagtgattatatctttcattgttatatccttggcatagggcttggcacttaaaggcatagacaaataaataaatagagaactgtaacaggtaaaaccaatgagaaaagaccctcgagacaaaaactggaaaatatttgaattaccatttaaaaaatactcctttaagtctcatgatttaaaacaaaatcagattatcaataagggttcaagtttgtgaatgctatcttttatattcagagaacttgttatttatgtggaaatgcaagagaaggccaatttgagacattcagaggcttgagaacatcccatcagaaatccttgaaaaaattactttaaattgtatgctaaataacagaaagataaagcaaaatataagcacataaaaggatgtgatgtcataacagatgagtaacaacaataaagaaacagggaagtgtaaataatttcaaaggcctactttataaaatagaatacagagggaataaatagagttaaagtgttctaaagaccttgaattttacaaacagtggtaaaatattaatgtatattatattctaaatcatgaataaatgctgtgattttgagggtaacatttaaaaatagtaaaagatcatataactaacaagccaatagagggataaaacagatcaataaaaatacttgattggtcaaaaaaaggcaagaaagggataaaaagaaacaaacagaggtgggctaataatagaaaataaattgtagaataacagatttaaactcaaatatatcattaaatatgaatatgtagacttattccatttaaaagagaaagattgtgaaattagacttaaaaactattgcttataagaaacacactttaagtataaagatacagaaagattaaaagtaagaggattataagatataatccaacatgcataccttaaataaaagaccaaggatgtcggtatatggttattgcataaagtagataagagataaagagaaatattttataatgacagaagagtcagtccaacaggaccataaaacaattctaaatttttatgtacccaataatatagcttcaaaatatctaaagcaaacactgacagaaatgaaaggagaaatagacaaatccatagttagagttggggatttttagcacagcactgtatccagcagctgcagaatgcacattctttttaagtccacatggaacatttgtcaaaattgattatatgctgctgggatataaagcaattttcaacaaaattcaaagtatcaacatcctaaaaagtatgatctctaagcacaggggaataaagctagaaaacaataatacttggccagttggttgcatttggagtgaaagatggagaaaggtgatgggagcaactggctggagtgaatcatagaagagtcacatcagagaaaagagcagcttttgacagatatgtatccaaggacagtgccctgtagactgaaatgcagagctcctggaagtaaggaatgcagcagaggatgggtctgcgggtctcaatggcaaacttaatcagctgtgtaagtttgtggagagccagtcactatggagaaatcctggctatgcttccacattgctgaaattgcctatcagataaattttccttccaccataaagcaaatctttcttctattcaatgtctatttgcctagtggaaagcatcacactattaaattcctccactctctaaggtcgtctctattgaatatttctgaaggtcaccagtatgcagcctaatgggccatttgattttaggctactgaaaaagtattacatgcatcttccaaatgtggtcacagttcataagtagcttaggcaccaatagaagctaggttggagtgcaacttgttccatcaggggtgctgcattttaggaagtgaggactccagataatgccgtggtaggtttcaacatgttttcattttttaactgtcaaattccagcttctccttgatttttcaggcttaaaatgaaacatcagaaatggaaagatattaaccctatattcaggctccctctgcccttcattccccactacagaactttcctgaaattcttttcacagactgccatgctctgtacaaggtaaagagttaaaaaatatttcctgagttgacttaaagaatgctgaatacacttgctcgtttcattaatgctttagtggcatattacatccaaagagtttagccactgtagcttgtttcctggtttgacaaagtattgcttattatttgaatttatgagaaatttcaaactaggtcttccagtgtgataaagaaataagccaactcatacttgcatagagagatttctttccaccccaaaggttcctgaaagataatcccaaaacaagaatccttggaaattttcctacttaaatgagaaaggctttggatagccagatcacaattaatgactgcattggtttgcccagaggcaatggggcttgttaattgagacacagagatcctggagggtggcccgattaccacatggccgctagaaatattgtgaatggcaataaccaggctattttagcctggtttcattctgatgtgattcctatggcaaattccatgaaaaaggatgtgtccccacggcccagagcctccctgctcctccccaggctccaggcccaggatcccatagccacggttctggcctcagctactcccttcttgcacggggttggttccttcccaggtgagccctcttctttacagtatcattccccaggccacacccagaatggagatctttcaaataagaaaggtttctggaggtaaccaggtctccatattcttcatcacacaactcaccccaccaacttccccgcaccatacatagcacccttcagcacatatgaaaacacttgtttgccaactgggctaactctggttggtccacaaggttatttggtactaattatccatagaacgaatacactacccccaacgacctaccttactttcatctcctacttggctttctaccagggagacttggtacctgcagaaggtgatgaaacaggcaaacgttgtttgtcaataatcacaatgaggaagggactttgtcacttccatccatccagaggctccatagtgctttggacatttcagagttggacttgacaacattaggaattatttctcttcctccttctgggccggttctgagctatgcagacagctcttaatccacattccagaccatccgaagctttggctgctgttctaggtttggctctgctgtgcatagagtaggaaagagaagagtaggcagaggtgcaaagatcttgctcctgaatgctaaataaaggaaatgcagcatttttttgcctaataagatcaatgcaataatccaagtttcaactccatgaaatattaaccctccggcagaacagataaacaaaaggaaaagaaaagaatattaacaatgttgggaataggagacaatgagtaactataacgtgcaagggtaaaagctcactctatctgcctaataaaatagaatcatttgtttgaaattcacatgtggttatgcttgatttatctttagccaatccaattaaaagcccagttccagagctttcctccagagtgacttaagtggtcaaaccataatacattcagtttgcaagtggcataattaaaacaagatgccagttaagggccttggagtggcttaaaataaaatctgactcctcatcaaaaaatgtacacaaaggtatagtgtggcaggaagcaagaagggaaattcagactttcgttctattcctggctgtgtctctaacttactccagactgcgtgccagtcacttaactctttaggctctgctctgctgtcttatctttgaaaataatgaggagcaactctcctgccggcctccagcaatactgcaaggctcaaaggaaacacatctagaaatatacagaaagaaaacagcccatttaacatagggtatgatagtattgattacaaatgttggttattcgtggtaacggggatggtggcatttgtaaaaacgttgctgggatatcactgcagggagtgtagaaggaagccaggcttggtgtctattaaattccaggaaagcataaaataaaaatattttactgatagaacaaataattgaagtgacatagaaatggcaacagtctaaagtcctaaaaaggttggtttggtccttatgagtgtagttttgtaactgtggccatgctggtgaaccaagggggagaccaggtctgggagcctttgagcctgaagagggaggagaaaacaaggaaaggatacgatgggcaatccttagccagctcagaggataagatctggatccctttagggagggcatggatgaagcaactgagtggttcattttcataagagttaagcagtgatataaccaaagattgaactatttgtatcgaggttccgtaccaaactagtgctccttaactttctaagatcatggactcccttgagaatcttacgaaagccagagaaccctcatcttgggaggctggggcaggaggaagtgcacacacatgtctctacaattctgctcctggaagcccgggtgtggaatgttggtttggaaaccccaaaccaagccttcatctccaagaatgcaacattcatttttatttgtctttctagcatttcttaagcagagttcctgggctgctcatggaattgaccaagttctgatgaaagaaatgatctaaagtgttatctactttggctgacagcactaattgacattcaccaaagtaaggctagcctcattgatccttcataaagagggcaaggatgtttatgttctcaaaagttcatgggcaagaaggctgcaggttgccaagcataccctcacctagccccaggtttggcccaaatggaaacatcaccctttcatgagtgttcctactttaactgaaccatcttctaactcaggccttaaagaaggtccacatggccctgctgggctgctccccaatcctggtctcaaccaaaggtccaaggtgaacatatgactggaggaaccaacttcctcaggagtccccttgccctcacagactcatttccacctccaggcctttgcatgggctgtcccttccacctaaaatgctgtctccccttctctatgtgagtaaaaatgggaattaatgggtacaaacccaaacgtaagtgcgttgagcatgtgatttaatagcctaaggggtaattcaatacaaatatcacaaaatcaaaaaatcttaaaatcttagggttggtttactcctcaaaggtcatttactccaactatctaacactaatactaatatttatagcaataaatagtgataatgacattaatactaatatcaccagtaatatcattactaacacaagcaatccatctccttgagtactgatctggctcatcagttgtttttctttttgcaggacaattaattcttatacacacacacacacacacacacacacacacacacacacacgccaggtatttagacaaagaaacatagcataagactaaagttgcatgaccttaaaaaaataaagaaagaattgaaaatagttactatttctgtgtactccaggatgaccttgagggaaaaacagacaagaatctgataatttagaaccatgcgtgcacacatacacccctcattttgttctgggaaggtagcccaaacctttcagtttttgtgctaatatggcccaagaagaagggagaaggggtcttaatgaaagctttgttttgtaataaaaagaatgaaatcagatccaccatttacaaatgactttgcatgtcacaaaagtctcttcctatccttcaaatgcagagacttgatcaaatactcagtcaaatgctcatccacctgccatttaaacgctcagattttcttcccagaaactcctctccaccaccactagagcctgttaactcaggtgtttccaaaagcaagggtttcctccttctctcaccccagaaagctagcagaagtcatccctccatctttgcatcccctgggtccttccagagatcaaagagcacagagatgcaatacttcccgtcactcaccctgaaaacatctccctacaggattggattccaccaccaacctttggcccaagttggcacagatgtggggcatgtgtcacagccatgcggcaaaagcagcagctcatttttctagctcacatttttcactgtagacaaagtatctggaaatggctcaggcatcacattattgtgaaagctgtcatgctaaaggctaagctctcagtgtcaatttatgaaaggcagcagacaattatttgctaggtgcaaggtgtgcatggatgtgtataaacatgtctggaggttatttctgatgatggagaggcatgtttttccataaaggaatagtctaaaataaggaaaaatattactaatgtagtccatgtggagacagtttctctgttcaattactttttacctgatgttttgctatgctctccacaatgtgctttacccatgcttagcatttcagggtgccgtcccacaacactgtctcaccttctcctcctcatagacttgtgaggttagctccccttcacatgtgaagaatgaggtatctcagaaaccccaactctactaaaaagacaaaaattagctgagcgtagtggcacatgcctgaaaccccagcttgggaggccaaggcaggggaatcacttgaaacaaggaggaggaggttgcagtgaacagagattgtgccaccgcactccagcctgggcaacagagtgagactctgtctcaaaaaaaaaatagattgaggagagcgacatataactgcactgtaggacacatagctgggctagaggacatgcacgtccttcttagagtctgggccatatatcatagtaaatagtgagtttaatagaggtccattgcctgaataatctttgggagaacctcttagacaatactccattgtaacattgaaaggacatgcagtcattcttttgccttatttccaagttttgtataagttttcataacagcttttaatcaaatccttatctcttatttataaaataagaaatacaactattgtaagatgatatctgtagttataatactgattgtaccaagtgacaattaattattttctaagcccagattctaaagaactgggcttttgttcaatctgcaaaaccacctcctggtgggtccaggctttccagaagtgtgtgcatgccacaaacattcagtattagcctccccaggggtaaggacatgaggcctctgtttggcagagccaaaaagggtctctctcattatctctgaaccctgagctgcttggagctgcctggagcagagccccagttgatgccctgtgggaggtcttctgacttctgtctcagaagatgaccaaggcctccatggtctccctccacccagaatcccagtctggagctggctctgggggtatggttgtgctctataaggctgtctctcaaccctaaacctcccaacctccttcaatgtcacaggcctatgatgacaacacccaacacttcatacttctcagagtcttttctctcatttcctttcccatcatatgcctctctcttccttttctccctcccatttcccttatctcctttctcttcatctttatctctcttttccccctagcccttttacatttgatcgtgtcactctcttggttaggataaaacacaaacccctccccatggtttcagtacctgctattccctctgcttgagacaccattccctctaaaattccttgggctagttcctactctctgctaggtttctgcttaaacctcatttttctcaaaaagaatttctcctaacaccatcaccccacgttaagtcctttccttttattctttctcatattgctctgtttctatagctatagcaattatctccattttaattaaatatgtatttgcatgtttatgtgtttaatatctgcataggcatttggatggagactttgtgggcaggactacacctgtgttttctgccacctctgtggtctgcacccaccactgtgcccaattcatagtagatgctccgtcgctggtaaacctggtgcctcacccactccttcttcactgccaccttctctaagctcacatcttacttctagaatatgatgggatcactggcagtaaggaacgtccagctcgaagaaggcagctgggaaagatattttaaacacactcagacccccagtgcctgacatcatccctgtttccctgttagcattaccagttcccagtatttgttgaatgaatgaattattaatattattctacctaatttcaaagcactatttcagacattaaaccatgaaatactaggaacaaaaccacttgacacagagagaaaaatgatgtatctacaggaaagactgctctggacatcgctagacccagggtttggggtaggatgaacagtcagtcattcaagcattggtggtaaccagggagcacactctggagccacagcaaggccaacaagggcaggtgacttgtaggaagagcaaggccgggaggcagttccagctcctccacccctcctagtgaccttgggcagctcacctcacctcctctatcactgtctttccagctggattcctcaaaggaccattctgaagaacaagtaaaaaaagtctatgtttaaggtatgatgaaaaccatcatcagtcagtagaaggtgagaatgagagcaggttgaccttcagacctgtggatcaagaagaaacatgagatgaccacaggtgagccataaatcacaccaaagtagctgttgatgaaaatagtctaactctgtaaaatacttgagatttattctgagccaaatatgagtgaccatggcccatgacatagccctcaggaggtcctgagaacatgtgcccaaggtggttggtgcagcttggttttatatattttaggaaggcatgagacatcaatcaaatacatttaagaaatacattggtttgattcagaaaggcaggacaactcaaagtgggggcttccaggctatagggaaatttaaacattttctggttgacaattggttgagtttgtctaaagacctgggatccatagaaaggaatgttcagattaaagataaagggttgtggagaccatgtttagtgtgcagaggaagctctcagatagcagacttcagagagagcaggttgtaaattgtttcttatcggacttagaaagggtgcctggctcttagttgattatctcctggatttggaaagaaaggaaggaaaacaaagggggaaggggattctctatagaatgtggatttttcccacaagagattttgcagggcaatttcaaggtatgtcaagggaatatattttggggttaagtattttttccatttctcataatgttaagccagagtcagattgaaagtaagtcacaatatatagggtcaaataaaacccatcagatgagaatttatggtttgtagggcatgactccatagactccttaggtaggaatttgggtaagataaaaaatcagtgcttagtcctcatagccaagggacgaggtaaaagttcacttacagcaagaggttcctgtgaagacctaacaacatgactccttccagttgttgttgtttattgttgagacagggtccctctttgtcacccaggctggagtgcagtggtacgatcatagctcactgcagcctccaactcctgggctcaagtgatcctcccacctcagcctcctgagtagctaagactagaggcgtgagccatcacacctggctaactttattattttggtagagatgggtctctttgttgccagactggtctcaaactactggcctcaagcaatcctctcaccttggcctcccaaagcactggaattacagacgtgagccactgcacccggcctcctttgagttttctttttcttcttttttttaattttaattttaattttttattatattttaagttctggggtacatgtgcacaatgtgaaggtttgttacataggtatgcgtgtgccatgttggtttgctgcacccaccaaattgactgcttgcttagtttgagtcactgtcaagccagccccagacgtctataaataataccaagagcttttcccttcttggtgcctgcggtttgccaagtttctcctctgccaatgagccctgtgaattggccaccacttgccaatacctcaactatgatgttccattccattaccctttgcctcagaagaagcaggtgggagccaagtccgcacactggctctgagggagctcataaccaatgtgtctggattggttagaatcagctcaaattaaaagtgtgtgtgtttgcctttgggttagattttgtttgttttttttaaagaatctgggaaagtaaccaagaattttgtaaaaaaacaaaacaaaccaaaaaacttttcctaaaggggcacctcaaacctggttctcacagcacagaaaaatgacacagaaggtaccatttgttcacccactgatttcatcctccagtgagcaaggtataaaaatgccatcttctcaaccatttttatgtttgtagggtttccatggggagggatttgccccgtctttcttcgttcctctgaatgtaatgaaaacaacagttgtttttctctcatgtctttgaatcgccaccttccctgatgcaatgcagatgtgttggttttgcaaataaaaaaggatgtgtgggtgtcagagcattgaccccgggagatgtaccctgaaatgctgaggctgtggaggaaggaggggctggcaggaccctctggctaaaaaataaaagtagaactacatcaaactaaaaagcttctgcacaatcaactgaaacaatcaactaaatggaaaggcaacctatggaagtggagaaaatatttgcagcccatatatctgataacatccaaactatataagaactcatacaacttaatagcaaaaaataataataataagtaatctgatttaaagatggacaaaggacctgaatagctatttctccaaagataaacgaacagccaacaggtacatgaaagagtgttcaacatcactaatcatcaaggaaatgcaaaattaaaacaataatgagatatcagctcacacctattaggatgacttataaaaaagacaaaagctaagtgccagtgagggtatgaagaaaagggaaccttcacagactgtcagttgggaatgtaaattggtacaaccactctggaaaacagtatgacgactcctcaaaaaattaaaagtaggagtatgacacgatccaggaatcctactgtgggtatatatccaaaagaatggaaatcagtgtcttcaaaagatatttgcactctcatgttcattgcagcactatgcgtaatagcccaggcacggaaacagccccagtgtttgtcaactgcttaataaagactatacgatgatatatatactggaatattatttagcaaaagaaaaaaagaaatcctaccacaaaagaaatccttgcaataatgtgatgaaactggagggcattgtgctaagtgaaataaatcagacaaagaaagacagatactgtatgatctcacttttatggggaatctaaagaagtcaaactcatagaaacagggagtagaatcagaatgatgtttgcagggcctaggggagagggttataaggagatgttgattaaatgatacaaagtttcagttataagatgggtgaactctgggattcaatgcacagcatgatgactctagttagcaataatgtattgtatacttaaaatttgttaagagaataggtcttaaatattctcacaacaaacacacacaaagatatgcaaggtgatagattaattatctggtttatggtaatcatttcacaatgtgtacatatatcaaaacaacatgttgtacatggtaaatatattgagcttttatttgttcattatacctcaaaaaaagtgagaaaaagatggttataaacctgagttaaatgaaggtaaattgactatttttagctgtataaatttaccttgctctagcgaattttatagaagaaatactgatatttcagcatcaagattttaatgaaaagtctttaaatatattttaattaagacttttaattttttagtgagagttaagaaactattctacaataataaagaaaagaaactgttctacaataataaagattaatgttaattacctgaaactacttctcctaacccttaaactagaaaggaccatctcaaccatccctgggtcttaggagcacagagcactaccttctacaagcatggcattggagaagccatttcatttgatgccaggtctaccaattgtgtgcatgtgagtggtgtgtggttgtgtgtgcatgcatgcacatgtgtgtaacagtaatatatggttgctagttttgtctctcaggtttgaagggattttcattttctattttatattttctcttcactgtcttaatttcttttcaattgtgttattttcataatcataaaaaaagctatttccattttgaagaaaaaatagatggttacttggcgaataaaaattattctttattttcatttctgaaagctgtgtttatggagagccaaaatttaaatgtaattgggcagagtgacaacagaaatgcccaagataagcagctatagtcactttcctaaactcctccgtgttccagggtccgccctcagtttttctgaccagggtcaggtcctctgtgtctcctctgtccccatccctacaactcttctgccccatctcataagatatcatgggcatttgaaaatgtttaataacatgcatctccttgggtctgggatgttgcaaaggaacaaaacgaccctgaagccattgagcccagcttctaaacaaagggatggtgggactgttatttagctcattccagttttgtgcccaccagatgtgacaactctcaaaggtctccagtcttttttgttctgtttcaagtgaacagatcctgcttataattttaccaggaaaaaaaattatctatctgtgctaagcttcaaattgcctttattttcctcggagaaaaaaaacaacaaaacactttttttttttttttgctttatttttttcctgagtatagctagctggttcttttgctattttatatcctaccttttcttctggtttgtatccccgaactcagtgcttctcaaattttaatgtgcacaagagttatctatggattttgttaaagtgcaggttctgattcagcaggtctggggtggggcctgaaactctgtattttgaaagcatatcctggcgaagccaaagctgctggcccagagaccacactgagtagtgaggctgtacctcatctggagacatagggaggtaaaagtaggtactgcattctactcagatggcctatttcttccataccctagaagtgcttgcagctctgtttttagccagctctaaatggagcacttaactaacgcatactgttattttaataatattaggtaaataaaaatgcaaaacttaagttgcagggttactaacatctcatcactcccagttgtccagtctctaggtgttcttggaatactcatccttgtgttcaactctcccactatctacttcggggcctcatgcctgctacctctaagcagtctagtgtttttatttagagctttccttggagcctgctgtcactaagtcaaattcaaatgctaccacttacatactgcatgtgctgcgtgaccctaagcacactgctccactgtctgaatctcagcttgcacgagtcaaagaaaaataaaatctaccctatacagtggctgtgatatttaagtgagatcctggtctctagcaagttgatccattctgaccccacagtctcttctaggctaaccccagggcctgaaatcccttctgtctcacgcccttgttatattatcttcaccagtcttgattttgatgttaaacatgtgtctgtgggacagccgcagatccaagcttgttgtcccacttggagcaagtgggcagaaccctcacagtcagactcgtttgaatctcggttaatttttacctaattagcaatcacaactgctttactacttaaaaagaaaaactatagctgttcctaagaattgcatattgatgtgaatattcagtaacttgggacacctttgtgccagattccttatttgcttacaaagatcattatttattcattgacaatttagttattaccattttaattggatgatctgaatagcttgaggcaagggatttcagatagctttcgcctggcataccaagtctgctcaacaaattgataattggtaatgttcctctggagtatgttgttaagaaagattctgaggctgcttccttccgggcatgaaggagtacctgatcatttagcaatagccccggtgggaagaccatcccttctttaaaccacagggatttttttttttttgtgtgggggtggggggagagggaggattatatcattctttccttatcttcccaatttagtcatattataaaatattggtagaaatttctacttcttgggtcaatgttataaactttgcgtccctgacttaaagttggattctaaatttagtgggaaatcccaggagaacaagagctaattttcacattcacgttcagaatcaattattacttattctttgagtgcctactcaatgccacacaggccctgtgctaggcaccctctcaagtcatcctgagagcatggaccccaccagctgttctttcacatctacaaagcacatgtaaaggtagacagggcttgttattctcccttgttggagggtctctgatttcaaatatcgaaacaaatatattttttctaagtatatttaataaatctagtctcttttcaattaaaaaacagtttcccagggtttaaagttctctaatgagtttccagaattttctatggtagagaaggaaatgtgattgcctttcggaaagcagttgttataattccaacatctcatcacaacaagcatgtttgtttctcaagactgaagcaggagaaggggaactaacttcccacaagacaacccacttggggtagctgctgtcagatgcatgggggttaaaattgtcacagaggtgaggaaggggcattgagaatagttgcacatgcaatccaacaggtttattgttttttcttttttttcttcttcgtccttttttttttttttttttttttttttttttttttttttaacatacacactctttgtcttgcaaagaaccaactggaagaagtactaaagacaggatacatctctaaccaccaacagtgaccctggcagtcttaactctttcctgtcagcactgtcatctttggggtatatagacatcagctgctccattcccttcttccctagctctcaggtccttatcattccctgaaatctccctgaatacaccccaggtctgtggggctcttaggcaaacacctctgcttctgagtagcaggtccactgcttcgtgtgctagtggtcctggaaaccctccctcacagctgcctcctgtacttttttaattccttaaaatagccagaaacctttcccatcaacactttaaatcaccttgaataggatgcccctatgtaccagactcctagcctggcagtcccatcacccactccctccctccctcccttccttccttcccttccttccttccctcccttccttccttccctccctccctccttccttcttttcttccttttctctccctgtaccccagaacttctgacctctgtgtggccactctctttgcctacagtgcttcctcactctcccactcactcctcttctcctaatgaattcgttctctttcttcagaggtcagttcaattgcttcttcaaggaagccctccctgacttctctaagtcagatcttcctagtaaatgatctcatagcaccatacccctccccattgtacaattttacatgtgggtgattatttgattaacgtctccattcaccaccagatgtaactcctaacagatgagaatagtttgtgatttttgctcacagaaattccagtggaattcctcgcatctagcattttccctgacacttagaaggtgtgcaataactatctgttggatgtaatcatgagaacaattccatttatcaaaagtcgttattctgtttcacccaaaactgggtgtactacaataaaatttgaatgctgaccacctggagttattttgcatcaggtcccacaagttacaggctgagtcccccacagcactgcctccacttcagatgccagccccacttcaggggcccccaggccacccacacttcagactgactataagtttggggttcctatgaccccctcagatttggtaattcactacaatgacccacagaactcaggaacatgctacacttatgatgacagttttattatgaaggatatagatcaggaacagccaaatgaagggatgcacagagcaaagttagagggatgcagagcttctctccctgtggaatcgggaggcatttgcccgacacatctgtgctttcaccaacaatgaagctccactgagctttggcctagagtttttactggggtttcattatataggcataattgagtaaattattggctacatctttgaactcaatcttcagcctctctcccctcctcagaggtccctctgacccaaatttccaatctctccttccttccttccttccttccttcctccctccctccctccctttcctgagtcacctcattagcatagcaaagatacttctctcactcaggatgttgcaagggtttttgaaactatgccaggaactagggataaaaactagatatatcatttattattccacaatcataaacaaaattacagcaaaacaatgctgttttgtttcattaaaactgggggaatttgggacatttcaatgacagtgggagtggggagagggaagccctctctagcacgactggtgggaggtaagttgatcaaaacctctattatggaagcaacctggaaatatgtactgagtcttaacatgtttatacccttccccagtaacccataatttggaatctataatagggaagcatccagaaatatacaggaagatttatctgcaagtatgtttgtcacagtgttatttattatatgaaaaaaatgaaaatgtcaaattccagtgataataaaatgttaaagttccttctaagtgtcaggaaaaatgctctaggatgaataaattatggcaacttcacacaatgaaataatatgtgtctattaaaagcattccacagatgattaatgacagaggagcatgttttagcatactattaagtaaaaaaaaaacacaagattttaaaatctgtatagtttaatattaatagtggctaattcttggagataacattgtgggtgattattattttttaatatttttctgccatttctgtaatgattgtattatttttataatcagaaaaaatgacattgtaaagaaaacccctcttcaaccactcggggcctagttgaatacagctatgaattataatcacaaattattctttctcattcattaaagtacatctggcaagacctttacttggcaccagttccttcgacattaatttaagagaccagtttatagctgagaacaataaagcttccaatctttccaaatttcatgtgagttttcacaagctgtccctctccataatttgttcagaattatgaaatttttgcctgctctcatctctggcaagctcacaggaatacgtgacagtcagtgcttggcagaacatgtcttctgcagctggagcccctcaacccacttagctctggaaggcaattaaagcgtggtttgatgataagcccctatcttttatcacccgcctatggtccctggggagcccttagagccacatcctggaatcactttcagggagctcctgtctaccttctctaaaaggcacactcctattgatggcaccaatcttttcttgtagctctgtttcagagcaggtgcccttccaaatcagactcaggttttcaagaacaaacttgtcctcctgacctcagccctctgtagaggggagccacgtctccttgacatgactgagaactccccacaaagaactgttttttcaattaaagtatgaatttcctaaagcatctcaacagcgtagacattccctaagggaagcaagtggcccccaaaccagattggggtccccccaaagtagtgggatactaagaatgggtggtgggaggtgggagtggtttacccaggtaaaggcagtaaaggggtgtattgtctgtagagaatatcaaatcaatgctaaaaaggtgctttttattatcatgtgtgccagcaattctaaacaaggcccgtgatacaattcttctcctcaaaaaaatcatttgttagaccactttctaaacaatggcgatgattgctattgagttttaataatgcatatgtaagcctcttattagtacatttttattatccttcataaacattgtattctacacaggagttaatttgaagcgctcccagttatagagtcagcttcgacacataggtgggctcagcctcacccattcatttcaaaagttggctctaaaagttgcagatagtttgaactgacttccagcattgttctcgtacccaacactgttggctctccatgttcctgtatttcaacagtagattcaaaataacaatcatagcacagtgactctaaagagtacaaaaccaaatgagttatttcaattgtcattttatgaaaccactcggagttgtacgtgtgtttaaattttaaaatagtaaaacagtttacaaacatcaaggggtcatgtttttgtttgatacatgcaaattttaattcgtacatgaaatatgttaccaaatttgaataatgtttttaaagtgcaaatctagtattttttattttttttaaactaaagaataaatcaagaaaatggtaattattactgatgagtacatgattgctactgaaaaaaattgttgctagaggagaagttttaaaaatgatctgtttggggtttcaaatgtacaaggtataccattgtcacaagtcacagattcatggcctcttgttactttctgttagtctggaagccactaccatttcctaaattcaaagaatcaaggaaaagacaggttctgatttcttatactttcaaaatttggaaatgctgaccaaatattcaatgatgggttgtcctaggcatgttaatttggctggtgtgttgaggttaatactagcatggggcttggagaaggatagacctgggtgttaagccgatttactggtgttctgattttagacaagtcatgtatcctatctaaacctcagttttctcatctgtaaaatgggaacttaataatgcttagcatagtgttcatgaacattaggaaaacaacacagtacaactacaaataatatgaagaagaaagaggaagagcacacacaaattttttaaataaccaatctacatgaaattagtctcacatttcttctacttaaagaaattttctgttttctaaccctagacatatgccacatctctaattactccagtttattttaaaactgtcatcatacgagcatgctttacagaaagtagtaattctatgaaaagcaatttacaaatcctaatactgcttggttcctaataccacatggtagaaaagtgggaggtattttaacaacactaaaacatcatagaatcccaaagcaaactcttactcttcctgggcatccctagtcccttatggcaaaggcctgtgagcatactgaactacagaagccagtgcccacctgccttacaaagagcaggacatttcatcagcctcagaataggctatgctacaacttgagcctaattcaaagacataaactttctccaaaatttaccgaagcaaaaccctttctctgcattttaacattatctccaatgttctcccaagtcgacctttccttaactgtaacaatctactttcccttaataaccagaactcatccacttttttaaaggatttctgtccctccgtgccattaacccatgtattctccctggcccctcattaccacagcctcatcgaagtctgacatctgttactgaaactctcatgtcgcacagatctgtgtatacctatggacaaggtgaccgcacatttcagtttgctgggtcagtcctggctccagtatgttgtttcagacagttattcacagtgcccccttttttctcaaaagcatctcagtgtgagtagtaagttacatgttgccctatctatagagaagaataagtctctgtcctcaattttcataaagaactgtaaatatcccctaagtatcctctaaggttgtttaaaaaagagaattagaggccaggtgcagtgactcacgcctgtaatcccagcactttaagagactgaggtgggcgggtcacctgaggtcaggagtttgagaccagcctggccaacatggtgaaactccatctctacaaaaatacaaaaattagccgggcatgatggcagatgcctgtaatcccagctactcaggaggctgtggtgggaaaatcacttgaacccaggaggcagaggttgaagtgagcctgaaatcacaccactgcactccagcctgggtgacacagcaagactccatctcaaaaaaaatatatatattaaaaaaaaaaggagttagaaagacacttctccatcataaaaattctaagctgagaagacaaaaagatcaaaggaagagagttaagacttggtggagcctgcaactcccaagcacttgtaggatacagatttctgatcctggcttttagcagataacaaaaactgacttgatttttgagtggaagtggtaggaggtggtgagttacagcctgtttcgtagttcagcctttctgggatgtctcctgatgccacacagatgctccagcttttggttcaagagaaattagagttagatccactccccaggaaagtgaaagcctcagcctttctagaaccattgtctggttttgactagatctccagggcacaaaggggctgccagtcctggctataggaagatgtcctgcctctcccaagtgtctccaggctacactgcttgctggctctgctccaccttatccctggcacctccagagcctgagttctttcctggggtccgggctgctctgcatagaccctttgggccattgctgggatgtcgggtctcaaacctcttctctacatcagtgttccacaacatcctttgagaggctctgtgataaagtccctgaaaaaaatgcactttcaaaacctgccttttggagattgacagtgcataatcacttataaaatgttccaggaagaactacaacaaagaagcatgttaaatgtttacctcagtgttccctgtatttttcactatagaatcccctcatgttttctgtacgcctaatatcccccaatattatgcttcgggaaattccactctggtttctctctcttctgttaagtttggttaaaatagaatcactctccagctgctaaggtggtttctaggctcttatgagatcagaggtctcttaaccttttattcgaagtcagcgtttattgcaaaaggccactggcctgatgctgaacagcatctttccctggcatttatcagtgtcacggcagctgtccccaacagccagattccctatatcttcctttttccggcatatttgagttggtggtaggctaagacctaagacagaaaaatcactcctccagagtggagcaagcacttggggcatggtgatgagagaagtcagttgtgaaagcaaaagggatttatagagtagaggcagcctgggataggaggtaggggtggtgggaacgatgcatgagcctcatgcggtgacaagtaaagacttttgattgttttttgtttgtttgttttggggtttgtttttattacttacaccctagtcatgtagctgtgtggtgcttttattccagaaaccagacttaagcaaaagggctccagcaacctaaaggagtggagagaatgtgtaccctgagaatggaaatggccacagctgactaagcccagtaaagcaagacttagtcactagaggcaagatgagaacccagtaagggaatagaacagaccctgcggccaagtgctggcctctgaatcattgagctagtgctgtagggcttcctgaatcctactaaaatgggacaaggactgacccagggcctgagacaaggatggccctaaagtaaagtcactagtgtcatctttgagaattaagaacttgcaatggcataaagagactgtgatgttaaagcctgcacttctttctagaaaagctaacaaaatcttattatccctctgagatacagactctcagttcatcctcaatactaagaaggggtcacccttcattctataaggggatattagttatctgttgccacaataatgccgcataagagacagccactgaatctcagtggcattctgcaacaagcatctatttcgctcatgcatgtggggtcagctggggtcagctaggcagctctgctgatcttggcagggcttgctgtggggctggggctggggctggggctggctggctgtcagccggtaaaggctggccttggctgggacacctggacaacgagatctgttttgttcagagctccttggggtctaggctcaaaagtgccacactgtttcttctgcaacagtctgttgactaaagtaagtcacacagtgaaacccagatcaaaatgaaacccagatcaccaattaaataggtgaaaaagactccacctatttaatgaaagaaactaaaaacttatgtggtgaaaagtgtagctatggagagaggtgaagaatcagggctgttaatgaatcacattatcacaggggtaacatgcccagtacccctttgctaattctgacacctatttttaaaacttaatcagagccttccttctgtagctagaggtaaagtgaatgagtgactacttgggcaactctatttacttatgtggcataaagaatgcagagctaggtttaaccagggtgactatgaaatagtttaggagagacattctgccaggtgggcgttctcgctagtctttcagacccatctggggaaccagagggaaaaggctggtgcttctccagcacatacccaataaatgtcatctaccatctgagaagcacagtcatgcatgcacttcattttagcatcaaaattctatgaggatgccagagccctgagagagatctccatttcctcctgaggctgtgagagctaaggcacctcccaggttcactctgcagaaaaggcagtgcccagacaggacctgctcccctgcccttcacccttggctacctctgttgcccggccccagctgcctctggcagcctgcagatactggtccctgaagcatccttggccaccccattctaagggcagcatgtggacactagagaacccagccaagccattttcaggaggcaatgcctcctttttctctgacagtttggacagcagattctcacacagccaggccacagctggaattccactggctgagataacagctttaggagctggacaaatgtgtgatggaagacctcgcttgtcttcaggaggcacttattttgttcctacttgtttttctgccagctcctcgggcaattgttatgactactttggtgcatttccaagagatgctagtaacactccaaaggcaagaaaccagaaaggaagtgaaatgcaataatgcagcagttgctgtgatagaggacacagggagatgccattcagcaccctgctccagctgcagaaactgtgacacatcaccacttataccccaggaggagaaagcccaagaatgagaaaatctgggcagcaaataaaaatgtcaccacactgtctcaatggcctgtaaagaggggcagagtgaggaagtcaggctgagagaatcactggggaaggcttgcaatagtgacagcctgctcttgccacccacagatgtttctctccaaactgttttgaggcataacgacatacacggggccccttgctaataaacagattgagcactagaacattgatttcctaaacctcctctctattcatatggtaacttactaaataggaaaacaaacatgttccttgaagaagaatgtctggacttttccatcacacattcatatatatcgtcatttaaatctactgggttttcagtgcttgcaacggatggcacacattctcatttcagcaggtctgttgagaatcaaatgtaaattcccagtgggaatttgaaaataaaattatctgtcaaaatatgtggcttgcgatacatcaatgaaaacaatactcacagccatagagaagacaaaaaagccataggtacagtgatagtcacaaaaggagccagtgttaccccaagacaacccagtagagctggaatccaggtctccagacaaactgggaaaggcttattgtagaggagtgctgttccatagaactttctgtgatcgtggaaaaattcaatatctgtgctgcccagtatggtagccactagccacatgcggccattgagcacctgaaatgcaaccagggcagctaaggacctgaattgttacctttttaaaatgttcaattaattgaaattttaatagctgcatgcagctagtggctaccgcattggactgcaccactctagtgtcttgctttttctactaaattgcattttgttctgttgtgttcaccagtatttctgatgtcaactttagctacttggagtgtttggcggtgttcccatcccctgtggcaggggctcaggaatgcaaggttgatggaatggtcctcactttggaggcagccagcctgaggggacaagcctcaacatgggaaaatttgggatcaagtatgtgggtgcctaaaggtcaaggtatttggactcctggtacagatgtaagagaaaagctgaaaaggaagacttcttgatttttggagcctgccttctttggaatgtgtcctttacagacagaaaaataagctggccttttgaagaaagaggaaggaggcattaaatgtgttatccttacagccagatgagaggaaagagaaatgaagagtgactagaaattagagatgctaggcaaggcatttcaaaaccaaaacaggaggggtcagaaaagctgttctctcccatgactttctactctgagaggagtgaccccccagcttcaagatgattcttgtgcaaatatgctcagtgtgtttttcattaagtatcaaaacaaaacaatggaattgtgggaaaaacttggccactgcatgaggtgaattctagggtttgtgggtctatgtattcaagggggccagaagcaccatgtgaagaccctgttggatgggaggtctgcaaagacaattcctgtcacttaataaatactccatgaggggggcatgtgtaggaatggggactggggaaagagagctgatgcacaccggtgaaacaaggactctaggatgggtcacccacattgtgatggcatccagaggaccctaatcaatatcctgtttgaggatgcatttgtgtgacagctgatggcctgagggggcataaaccctatgatgatgactagcgaacagggcttgagggagaaacacgggtagaactggtatgtcttgggtccttattctttccctcagaacattgctgatttcaacatggccccaagaaacaccccaaaacacgtcctgtccatctcaacccagtcacaaacttccttaagcagtttagtctcatgtctaaacacaccaatattttatttcttaataactccctgagtttagattatgactgagctctccttccaagtcagtgaagagaggagttgacaacattgggtctccatttgggaaaagagagacaacgtgtcgggtttctaccttttctcacagtgagagtttagccaactgcaaagttagaacagtccacacaaggccaccctcacttctgacagcaactgtaagtgtgggtggttccccaaacaaccctcagtttcaataattcactagaaggactcacagaactctgttatactcatgattatggtttattatagggggaggaaagagattaaaattagccaagggcaggagctcattgggtggaatccagggacgtactaaatgtggagcttccattgtcctctccctgtggagccaggatgcattactgttccagtattggtgcatgacagtatgcagagtattaccagctagggaagctcactcaagccttgagtttagagtttttattggggctccattacatagtgatggttgactgattgattgcccatgtgtttgagttcagtctccatgtcaattgatacctcatgaccctaagctgctatcctaaatcacatggccagtccctactttaagacatggccagctcgaccataagttgtactattagactacccactgtgacccaaggcttccaggcaaaccaagacacttctttcaggaatatcatgtcaaggcctgagggcataactcccagaagccaacatcaaaggctagatgtcttttggggcaaggttaaattctttactacatactcataacaagaaactcaaggtggcttgaagacctaactatgaaaaaaattaaagctccataataaaatatgatgaaagttttacaatcctggggtgtagatgttatctaaacatacgattaagcctataaaccatataggagaagattgaatacaaaaaatataaaacttttaaactgaaaagataccacgaacaaaatgaaaagataatcaaaattggagaatatattcacatcatattgaagtcaacacatggacatgaaaagacaaatggtgcattagaaaagtggacataatctattaggaacagaaaaaaattaaaaaaaaaatatacactgttgatgagcatgtaggtcagtataaccttttggatcattaagaattttgggtcattaaacttttgggtcatttagagtcattaaaatgtaaaattaaaaatgacattttacctctaggaatatggtttatagaaattgtgtacaagctcagaaacgtatgtatgtgtgtctgtgcggcattgtttgcaataaagagagacaggaaacactctaaatctccagcccatataaaaaatgttatgctacacaaataatgagagaaaactctacaaactgatgtgaaaagaagtccataggcattcattgaatacataagttacaaaagaatatttatggcctgattttggttttgtatataaaaaggatgtaaatatatatataatctattcatgtataatgatgaatacacacatatgtgttacatctacacacaggaaaaacaaagacttttaaggtgttactccaaggtagaaatggaaggattagctttcctgttttatactatgatttcatttgaatttgttccagcaagcacatgtgcgtgtgtgaattttgcaaccgtgtacacacgtgtatgaacagtggttttgcagtgtgtcaccttggctgcactggagctgcttcttacaatccccttctctttaggattctaaggtagagttgctgagaaagaagtttgcaggagacatggagggcagaagtaaatcaacagcctttattgtccgatagccgttgtggccagatctagtgacaaagacagagaaaaaggtgctggtggattctacctcatcctaatttctcccctactcagcaaccaggtcttctcagctctggccctgctgaccaacagctgccttccccctaatgtggggctgcaatctcacagcagcggtggctatgagcagccctccacagcctctcccttcccctttgcaaccccacgctggcagctggtgcatctggccacctccccacctcccctgcagactccaacttgtcctcccatgccagtgcttcagaagggctagagagagaatttcctctgacctcccaactcccctttttgggcctttattttccaagcccctcccacatttgcgaaggtttaatgtccatgtaagtagtctctcatttcataatagtcatggtggttctgctttccaattggatcttgacggatacatgtccacatattttagatatatatatataaaatatatatatctctctaaaatatatatattttaatataaaaatatataaatctaaaatatatatataaaataaaacatatatatataaaatatatatatgtgtgtgtgggtgtctgtgtgtgtgtgatgtatgatgtgaggaaagttttctaatgggaaagctgagtttcacttttcccctttgagactctcatgccatcagccctcaggcctaggatgcacccctgtcacactctggcccacttgggagcaaaactccccttcatcttcgtcatctcagcatagcttagatagccagagacatgaaaaaatgctaaaccctaagggaaatcagcagagtcctcacaatatcaaaacaggacaatttccagagcaggctgggactcctcccgagctaacttgatttgggggattcttagattccatcacacatcttagatgtggatgtcacccttaaattctttccctaaaagtcccttctgtagacttttagatccagtgaatcccagtggcaatgggaataaaagtgaggaagagggaacaagtatttcagcattgcctgccatgtattgggtacttaaactgcaaacatcctcttactttttttttaattatactttaagttctagggtacatgtgcacagcgtgcaggtttgttacatatatgtacatgtgccgtgttggtttgctgcacccattaagtcatcatttacattagatatttctcctaatgctatccctccccactccccccaccccacgacaggcccggtgtgtgatgttccccttcctctgtccaagtgttctcattgttcaattcccacctatgagtgagaacatgcaatgtttggttttctgtccttgcgatagtttgctcagaatgatggtttccagcttcatccgtgtcgctacaaaggacatgaactcatcctttttatggctacatagtattccatggtgtatatgtgccacattttcttaatccagtctatcactgatggacatttgggttggttccaagtctttcccatcgtgattggtgccgcagtaaacatacgtgtgcatgtgtctatacagtagcatgatttataatcctttgagtatatacccagtaatgggatcgctgggtcaaatggtatttctagttctagatccttgaggaatcaccatactgtcttccataatggttgaactagtttacagtcccaccaacagtgtaaaagcgttcctatttcttcacatcctctccagcacctgttgtttcctgactttttaatgatcaccattctaactggtgtgagatggtacctcattgtggttttgatttgcatttctctaatgaccagtgatgatgagcattttttcatgtgtctgttggttgcataaatgtcttcttttgaaaagtgtctgttcatatcctttgcccacttttcaatggggttgtttgatttttttcttgtaaatttgttgaagttctttgtagattctggatattagccctttgtcagatggatagattgcaaaaattttctcccattctgtaggttgcctgttcactctgatggtagtttcttttgctgtgcagaagctctttagtttaattagatcccatttgtcaattttgactttcattgccattgcttttggtgttttagtcatgaagtctttgcccatgcctatgtcctgaatggtagtgcctaggttttcttctagggtttttatggttttaggtctaacatttaagtcttttatctatcttgaattaattttcgtataaggtgtaaggaagggatccagtttcagctttctacatatggctagccagttttcccagcaccatttattaaatagggaatcctttccccatttcttgtttttgtcaggtttgtcaaagatcagatggggttgtagatgtgtggtgttgtttctgaggcctctattctgttccattggtctatctctctgttttggtaccagtaccatgctgttttggttactgtagccttgtagtatagttcgaagtcaggtagcgtgatgcctccagctttgttctttgggcttaggattgtcttggcaatgcaggctcttttttggttccaaatgaactttgaagtaattttttccaattctatgaagaaagtcattggtagcttgatggggatggcattgaatctataaattaccttgggcagtatggccattttcacaatattgattcttcctattcatgagcatggaatgttcttacatttgtttgtgtcctcttttagtttgttgagcagtggtttgtagttctccttgaagaggtccttcacattccttgtaggttggattcctaggtattttattctctttgaatcaattgtgaatgggagttcactcatgatttggctctctgtttgtctgttattgttgtataagaatggttgtgatttttgtacattgattttgtatcctgagactttgctgaagttgcttatcagcttaaggagattttgggctgagacgatggggttttctaaatatacaatcatttcatctgcaaacagggacaatttgacttcctcttttcctaactgaataccctttatttctttatcttgcttgattgcccttgccagaacttccaacactatgttgaataggagtggtgagagagggcatccctgtcttatgccagttttcaaagggaatgcttccagtttttgcccattcagtatgatactggctgtcggtttttcataaatagctcttattattttgagatacattccatcaatacctagtttattgagagtttttagcatgaagggctgttgaattttgctgaaggccttttctgcatctattgagataatcatgtggtttttgtctttagttctgtttatgtgatggattatgtttattgatttgcatatgttgaaagagatttgcatcccaaggatgaagccaagttgatcttggtggaaactttttgatgtgttgctggatttggtttgccagtattttattgaggattttcgcatcgatattcatcagggatattggtctaaaattctctttttttgttgtgtctctgccaggctttggtatcaggatgatgctggcctcataaaatgagttagagaggattccctctttttctagtgattggaatagtttcagaaggaatggtagcaactcctctttgtacctctggtagaattcggctgtgaatctctctggtcctgaactttttttggttggtaggctattaattattgcctcaatttcagagcctgttattggtctattcagcaattcaacttcttcctggtttagtcttgggagggtgtatgtctaggaatttatccatttcttctagattttctagtttatttacgtagaggtgtttatagtattctctgatggtagtttgtatttctgtgggatcggtggtgatatccgctttatcattttttgttgcgtgtatttgattcttctctcttttcttctttattagtcttgctagaggtctatcaattttgttgatcttttcaaaaaaccagctcctggattcactgatttttgaagggttttttatgtctctatctccttcagttctgctttgatcttagttatttcttgccttctgctagcttttgaatgtgtttgcccttgcttctctagttcttttaattatgatgttagggtgtcaattttagatctttcctgctttctcttatgggcatttagtgctataaattttcctctacacgctgctttaaatgtgtcccagagattctggtacgttgtgtttttgttctcattggtttcaaaaaacatctttatttctgtcttcattttgttatttacccagtagtcattcaggagcaggctgttcagtttccaagtagttctgcggttttgagtgagtttcttaatcctgagttctaatttgattgcacagtggtctgagagacagtttgttgtgatttctcttctttcacattggctgaggagtgctttacttccaactatctggtcaattttggaataagtgcaatgtgttgctgagaagattgtatattctgttgaattggggtggagagttctgtagatgtctattgggtccacttggtgcagagctgagttcaagtcctgaatatccttgttaaccttctgtcttgttgatctatctaatattgacagtggggtgttaaagtctcccattattattgtgtgggagtctaagtctctttttaggtctctcaggacttgctttatgaatctgggtgctcctgtattgggtgcatatatatttaggatagttagctcttctttttgaattgatccctttcccattatgtaatggccttctttgtctcttttgatctttgttggtttaaagtctgttttatcggagactaggattgcaacccctgcttttttttttttttttgctttccatttgcttggtagatcttctgccatccctttattttgagcctatgtgtgtctctgtacgtgagatgggtctcctgaacacaccacactgatgggtcttgactctttatccaatttgccagtctgtgtcttgtaattggggcacttagcccatttacatttaaggttcatattgttaagtgtgaatttgatcctgtcattatgatgttagctggttattttgcccgttagttgatgcagtttcttcctagcatcgatgatctttacagtttggcatgtttttgcagtggctggtatcagttgttcctttccatgtttagagcttccttcaggagctcttgtaaggcaggcctggtggtgacaaaatctctcagcatttgcttgtctgtaaaggattttatttctccttcacttatgaagcttagtttggctggatatgaaattctgggttgaaaatccttttctttaagaatgttgaatattggctcccactctcttctgtcttgtagggtttctgtagagagatctgctgttagtctgatgggcttccctttgtgggtaacctgacttttctttctggctgctcttagcattttttccttcattttgaccttggtgaatctgacaattatgtggcttgaggttgctcttctctaggagtgtctttgtggtgttctgtgtctttcctgaatttgaatgttggcctgcctcactaggttggggaacttctcctggataatatcctgaagagtgtttccagcttggttccattctccccatcactttcatgtacaccaatcaaacttagatttggtcttttcacatagtcccatatttcttggaggctttgttcatttctttttactctttttcctctatacttctcttcttgcttcatttcattaatttgatcttcaatcactgataccctttcttccacttgattgaatcgcctactgaagcttgtgcatgcgtcacgtagtttgtgccatggttttcagctccatcaggtcatttaaggtcttctatacactgtttattctagttagccattcgtctaatcttttttcaagtttttagcttccttgcaatgggttcaaacaacctcctttagctcagagaagtttgttattactgactttctgaagcctacttctgtcaactcgtcaaagtcattctccatcctcctttgtttcattgctggcgaggagctgtgatcctttggaggagaagggacactctggtttttagaattttcaggttttctgctctggtttctccccatctttgtggttttatctacctttggtctttgatgatggtgacctacagaaggggttttggtgtggatgtcttttttgttgatgttgatgctatttctttctgtttgttagttttccttctaacagttagatccctcagctgcaggtctgttagcgtttgctggaggtccacttcagaccctgtttgcctgggtatcaccagcagaggctgtagaacagcaaatattgcagaacagcaaatattgctgcctgatccttcctctggaagcttcatctcagaggggcacggggctgtatgagttgtcagtcagcccctcctgggaggtgtctccacattaggctatacagggatcagggacccacttgaggaggcagtctgtccattctcagagctcaaacactgtgctgggagaaccactgctctcttcagagctgtcagacagggatgtttcagtctgtagaagtttgctgccttttgttcagctatgccctgcccggagaggtggagtctagaggcaggcaggcctcgttgagctgtggtgggctccacctagttcgagcttcccggccactttgtttacctattcaagcctcagcaatggcggatgcccctcccccagccaggcttggcaccttgcagttcgatctcggactagcagtgatcaaggctccgtggacatgggaccctctgagccaggcatgggatataatctcctggtgtgccattttggtaagaccattggaaaagcgcaatgtttaggtggcagtgtcctgattttcctggtacagtctgtcacagttttccttggctaggaaagggaaatcccccaaccccttgcgcttcccaggtgaggcgacgccccgccctgctttgtctcgccctctgtgggctgcacccactttccaaccagtcccagtgagatgaatcaggtacctcagctggaaacgcagaaatcacccatcttctgcatccatcacagtgggagctgcagacgggagctgttcctatttgggcatcttggaacagaccccctcaaacatcctcttacttaatcctcacaacatcttgtgttctaagaagagaaaatggaagctcagagatgttacacaaatctcccaaagtcacacagctgaccactgagtagcaagaccaggactcaaagtagttaagtttgaatattagacatggcttgtacacatgatctggtctttgagatggatccacttcagctgcctcctgaatttgtcagctactcttgcacaaaccaacaagctcaagatcttcacggctcacagcaacaagcacttatttctttctcataggtgtgtgggttggctatagattggctgtgggttgcctgggcccagttgagtctaggtggcctcaggcttgaggtctggtcaaggtctgttgtgtgtcttcattctggggctgggactgaaggagcagtgactactcggccatgttcttctcatggtggatggtacgtgcttaagacggcgagtgggaactttccatgttcttaaagcccaagctcagaactggcacactgccccttctacccatgtctctttggtccatagcaaattggcctatagtcaaggaggggcagagaagtaccctctttccacagtgggaaggaaagggaatgaatatttgtcaacattcttcccaaaagtcctgactccaaatttcactttatcttctgaaacaacatccttgcattcaaggaatgagggcttcccttctagcagcttcctgttcaaccaactacagtgtaacttggttttagataacaaaatatgagtataacaaaatgactattgtattcattatctgttgttggtaataaaccacccccaaacttagtgtcttcgaatgacaacaatcatttattttgctcatgaatctgtaatttggacagggcgcagttggcatagcttatctgctcaggtatcagttggagaggtgggagtgactcaccctctgaggctgtaatctcccaaagactcactgcactcactcacatgtctggtagttgatattagctgtcagctgggacctcatctgtcagtcagaacacaacgtgcattctctccatggggctttgttggtttcctcagtctgatggctaggtttcaagtgtaagagtccttacagaacaaggcggaagtgcatgcaatttttatgatctacctttgagagtcacataacttcacttctgccatactgtgctgcatgggtagtcacaaaagtccactcaggttcaagagaagggaatagggattcccaccacttcatggatggagtatcagtggtacatcgtgagaagtaggtgtgggataggatgcgttatggtagccatctttagaaaatatatatgccacaaccatataatggcaactcatgccatctgatgggggagggcatttttcttcaacagacaaaagttactaaaataatagtcaatctttcaactcctttaatgggaactgaaaatccctccttcacattttgcagccgtactcccactgtgtggcactactgatcatgactgacttggaccaagccagtcctaggtaagcctgggagtaagttagggtagaaggacaaagtttgcatccatggactgagggatttgtgtggcattaaacgttagcaagacctagcaagtcacaggcatttctcaatgggaatttttggagaattatattcaaaactcccaataattgtcttggcgttagtgtgaagaaagaaaactaatatttgtgatgcccatgtgccaggcactttatgacatgctttccatttaaccctttgtttagccctttccggttgatatgactccaggtagatctcattatccccatttgtggatgagagagtcaaagacagaagggttcggttaccttctcaagaccacacatctaataagtgatagagctaggaattatctcaaagaaggtaaaattgggacaaaccctttgatagtctctgattttaaaaaaaaagccactgtcacaacagaggagaaaaacatgtcaatctcacacgtaagcagatggtggggatgcaagttaatgacagtgagaggggaactggtcacctgcagacagagcttttgaagaattctgctccaatctaacagcttgtcaagtgactagtgacctaggacagttggtcaccacaaaatcaagtgtcacagcagggctacatcaacctgcctgcaaagccttctaagattctgctcatgtttggaggtgagaagagggaaaccccaagagaaatccccacagcaatgatgagctaaatccatctcctcatctcaattccaagatctttcagaagatgacagaggggagttttaagaaatccttatgcccgggtgacaccgtagatcaattaaacctgaatccctggagtgagacccaggaatcagtaatttttaaaagtctctaggtgattctaattgcagccaagtttaagtactattgctctacttacagttaatgcttatgggagcccagaggagcctgtgtgtggcacacaatgcaagaaaacaacaccatttcctactccatagttctgcatgttttccccttctctgggtttttagtactcccaataaacaggaagaccctccctctacacccttttccctgctgtctttttttcatagcacatatagcccctgctaggatactctctacttatttgtctacctgtttattatctgtcatctccactagagtgttaggtccatgggccagcggaccacattgcacagctccagaagttgccatttatatatgatacaagatgagtgatgccccctggagttatgtgatgtattagcccttcatgggggcggacattttgtctcgttcactgttgtttcccaaagttctggaacagtacctaaaatataagaaatgttcaccaaatattttttgaatgaatgaagaaatgaatgaatatagaaaagtaataaggattctcctatggaaagacctggtctccctccagcctaaaagcttgactctgatgctcatcatcctcttcttcatcctcatcaccatcatcattatcatcgtcatcatcatcatctgttattaagtcaccacataaaatttcctttgaaggcaggtttccatgactaaaaataaaagcgtgaaaactaatcccctgtcgagatgaactaatgttcaccttgccccagactctgcccatccaccacctcaaatggctttggagccagacagacttgagtttagaatctgccttcatcacttactagcaataggacccagggcaaatatttatccctaaatggttataacagtgaattaatagactattatagattaaaagagtccatatttaaagtgccagtgacaaataaatatatgaaaacatgcccaatttcactagcatccagggaaatgcaaattaaaacaatttttactcatcagattggccaaagtgaaataatatattagtaagagaatgctagctgctattaacagataaacctcaaaaatctcagcaacttaatacaatagacttaattttctctacagctaaagaccaatcagcagtgacagggagagatgctcagttccacgacgacattcacaggctcagactgattccctccggtggctctgtttacccccatgggccttggagcttttcactagatcctctgccccccttacaagaaagggattgcaccagaggtttgtacaggccagcttattacttctgcccaatttgctttgggcagaccagtgacatgtccttacctaaaggcaagagaggctgggaaatgcagtcttaactgggtggctgcctcttagcaacaactctagactatagaacaagagcaggactctttagcagacaactggttacgtctgccacacataacatcaatgtcatgaagatgtgggtaagtgggttctcttacatgccactgacagaaaagtgaactggttataggctctatggaggacccaaggcagtgacttttaaaatttaaaacatggttgttgtgtgttccagcaacttagcttcttggtagcaatccaagaagccctagcaaatgggctgaaaaaggcatactagaatgtttattacaacactgttgcaatcatgaatacaaacaaaatgtctatcaacaagggaaagtccaaatgaaccatgtctatccctactatggaatactatgcaccagtgtgaataagatagatctatacctatttgcacagaaagtatctaaagtcactttgttgagtgaatacaattttcaaaataatacagtatgatagtgtttatataaaaatagctatacaatactacatattttcgatatggttgtaaatttagtaatgaataggaaaaatgtctggaggcacatgaaccaaaaagaaataactattctagagaaagatagggaggaggagagggatggagggaggaagaagagtttgacagtcacagaaatatgaagatcttacggccgaacaagtgcagacccacacgcttataaaaagatgatgcattaattccactcctaggtatatacccaaaggaactgaaaatagagactcaaacaagtatttgtatgtacatgtttgaggcagcattattcacaatagccaaaaggtggaaacaacccaagtgtcattaacagatgaatgtataaacaaagtgtagtatgtacttacaatggaatattattcagccataaaaaggagtgaagtttttacacctactacaaaatgaatggacgaaccttgaaaacattgtgctaaatgaaataagccaggtagacacaaaagaaaatattgtattattctacttagttgaaatatctagaataggtttatcaagatggaactttataaagatggaaataagattagaaattactaggggctgggggcaggggaataggaaattactgcttcatgggtacagagtctctgtttggggtgatgaaaaatttttggaaataatggtggtcatatctacatgtaacattgtaggtatgattaatgccactaaattgaatgcttaaaaatggttaaaatagcaaattttatgtgataaatatcttactaaaataataaaatgaagaaaaataatcaactgatctacagttgaacttcagaatatatatatgattcaatatactctcaacttgctttcagagagaatcaaataggttcttcctgagtcgagagaaggggaatgaagattataggggtccttgctggaaaccagatttttctctcttctgccccaacacatggcttccaacatttaggtgtctgactttgctgtagactattttaaaatgacagacttgtgtaaggaaatgaaagaatgcaattaaatctgatgacgagtgtgctatttaaatctccttaataggaaatcttctgaatttagtcatgtactatgaggaaatgataatagaagtagaaaatgcaaggtatgctgtaggaagtttgactttgaatcagatggagggagactagctcttcctccttggactaattgctgtattgatgcaattctccatagcgccatgtgtgttttgagggggtggagggagggcggttgaatgatttatgtgtttaatttccctcgatgcttagaaggctgctgccctgcactccgaacagggaaattgattaaaataacgattgtggagagcacaaccccttgcaatcagtaacagggagctgttttcctctcctggaattagaatcctgatccctcccagatgcctggggtcatctccttggccttggggaccagtgtggaattttcaaagctaacaagacttgaccttaactaacaagttcagtggaaagagtaacaaatttgacagggtccaaaaagcagagcagagttcgtctcttaatggtctctgctttgctcctgctcttcagggactctagttctcagataaatgcatttgtgatcaaataaaaattaacaaatatttatggaaatagtgttggggagagaggatatggtttctgtgtggagctaaggggacaaaagtcataagaactgacagaagagaaagagaattttggctttggaggtgatgttgtttagcggaaggaaacaggtgtggaaccagcaggcctcgtcacttactaacttctatgacttgagcagcgatttttttcctctctgagccacagcttccttgtctgcacaataaggatgataataatgtctactgcatggtattgtatgctagaagggtgagaggtgtaaaggcctggtgcagagtaaaagcttagtcagtgattggcgttattggcgttgctggttctggatcacaaaagtggagaactgagacctgaactctcagggcacttagggtgagatgagagaaggtggcattgggatgggcaccaagtcaactgacaagctagaaatcggacaggaaaagggatttgttccatctttaccctaactggtctgaccccacctggatgttctccaattcaactcagatattaagtacccagagttaacacagatcccacaggtgaagggcaaagtcatccacaagcctgccctcacttcaaatgccagctgcacttcaagggccccaggccacttccgaccaactggctgtaaatttgggagttctcgtgaccctctcagtttccataattcactagaatggctccccgagctcacagaaagcaatgtacttatgattgtacctttattattaaggatacatgtagaggaagatctggaggggtcttggatgcagagtttccgtgctcatcagcgtggtcatcaaccaggaaactccaccatgcctcgatgtccagagttttcactggggtttcattacatagacataattgattaaatcattggccatgggattaaagtcaatctccagtcctcctctcctctcctcgaggactgaaaatcccaaccctctaatcacatttggtgtttctaaggaccagcccccatcctgatgctagctaccatgagtcacctcattagcataacaaagatactccaatcactcaggaaatttcaaaggtttctgaagctctgtgccaggaaccaggggtatattctttattatatataaattgttatataccagatatattctttatagtaccacagggttggagcttgaagaactagctttgagtcggtcccaactggtttgtacaggaccaaccttgacttgtttgtccacctggatttcagtatcttcctctgtaaatgaaagcattgcactattacctttagaagtctgattcagcaaagaaaagaatgtacatatagaaaaatcctggaaggacataaatcaaaatagttaattggagaatttctgttctttataatttctgtaatataatgtctatattttttatactttttaaacatgtaaaatgtcttttgattctatgatactaagaaacccacaacttttaaaattgaagcatataatttacatatttataatacatagattttaaatatacacagagttggatgaattttgacaaatgtatacacctatgtgaacaaacacctaaatcaagatgtcaacactgcacctttccagttgatcctatcccacctcaccccagagccagctctactctgatttttaataccacacattagttttgtctattcttgaatttcacataaattgaatcatacagtatgtagtttatctcactttctttctctcagcatattgttttgagatacattcagtttgaatcagaagttcactattttttatggctgtataatattccattgtatgactatgccactattttgttatcaattctcctgttgatagacttttgggttgtttccaggatgcagctattaagaaaaatctgctataaacattcttgtactagtgttttttgtggacataagcctttatttctcctgtatatatacctaggagttatgttaatttttttttaacggccagtttccaaagtccctgtatcagctaatgttctcaccagcaacgtatgagagttctagttgctctgccatctcaccaacacttggtattgtcaatccttaattttagtcacctgagtgagtgtgaagggatatttgtggtattaatttgcattttcttgatgactcatattgggtatcttttcatttgctctctgggcactcgtgtattttcttgtgtaaaagttttgttcaagtcatctgttgtttttatttttaattgggaaaatgcttaacttttcacaggcatttttatatcagcttcctcattatattctcttaaagagcccaggatgtgggtgactcagcagtgatcccttgttacagttgaggacactgaagttcaaagaatgttcagcaaatgcttcacagcagggtgttggaataatggaaactggaaatgggaccttctcatcctgttctcttttagattctgttttccttctctaaggaaggttgtggtgctgggaagacaataagcaaatgggcccaagtgatatgcttgcagttctgatttgttgtgagcaagcatgggaagggaacacccttgctcttcctatcagaccttggtgcctgcctaatgcaaccaacatggtggatgtactgtgaccaagtggagagtgctcttcagcagctgcttaactgcccctcccatgaaatggtgggcagactctgcttctaagttcctcaaacatcagtttcagcacaaccctaggaccatatggccccactgagtgaggctgggacatccgggccaaagtagggagaggtactctccagaatgggcactttgccatactcctcacacggaaggggaacacatctcacacctctctctgcagtgctcacacctgcagtcccaggaaaatgtccagttcattcaaacaagggagcaagtctctagatgacccattattgcccccagccactcacttttccctgcatcccacagttccactctctgcctgccttgacattgcttgctgcctggactctgaaggtgggtcatttactttaattaacttttattgatcacctactataagttcagaatagtcatggtttcttccacttacattatttcaatatcttgttcttttaaaaattcatctgcctaccatttcatgcctttaaagaatctctatcctaaaagtgtgtgactttttaaacctgtgtggcccatcacccagatcaagatgtagaacatttgcagtgccccaaaatgttctctcaaatcctcccagccaatattctgtaaacataaccactactctatcatcatcaattagttttgcctgtgctggaacttcatatacatggtattacgcagcatgtattattttgtgtctggcttttgctgaacattcatccatgttgcatggagcagttgtgttttatttttcatttctgaggagtagtatgtagtagtatgaatatatcccaacaagttaatctagtctactattgatggcatttggtttgtttccagtttgaggtactatgtaaaatgctagtatagacattttcgtagatacattttggtgaaaataggcactcagcccatatagccaggaatcataatgtagttatgtttaactttataagaaactataatacaattttttgaagtgtttgtatcaagttttaatctcaacagaaatatatgacaattctaattgctctacattcttgccaacctttggtattttcagacttttttcttttagaagtacattgtattatagttttattttgtatttccttttaaaattttaaaaaaatgtttgctaaattagtcagaattcatattaaaaatgaaacaactgaattaatgttgttgtttttaaaacttcacactcctggatttgtaaagcagtgcttgatggattgaatgagatcatctattactcaggtttgcaaaaacatagcaattacagtaatgaactccagtcatcattagcatttccattactaagggaccctttcaaaacttcagtctcctcttagtagctagagctttggaaacctcatggggtttgttttcccaccatctatactacggacaaaggacttctctgcagggccacttaaaaatatagattcttaaaaggctcaatatggtaagaaggattgtaagtgaatggcccaattaattcctgctaaagatttctcataggaaatctttgttcaattttgaaaaatcatttatttgactttggagtgatcatttaatatatacatgtcctatgttgaaggcaaagaatgatctttaattttgaacagttacttgtttcacaaatttgtgccttattatttaaatgatttgaattcttcctgagaagggactatgtctacttgtacacttgtatacagaccaatataacaactgagccagggtctggaacgtagtaggagctcaataaaactgttaaatgaatgagttaaaactgttccttctcatgtatatacagtacctaacacaaatctctgcaaatgacagccaacccagaaatgtttgtgaaaagaaagtagaaaagctgtaaagaaagattaaatgagtggaagggaagaaaagagaattaatcctggcaaaactctctttatatcagcaagaccttttttattttcataatacacactctgcacaacaaccacccaggtatctacttgaatgtcctgcagactcctcagttcaacatgtccataactgaactcaccataacactgatttttaacccaaccttcaagacctcctcctactgtatatcctcttcgttaatactaccacaagccaacactgttccccaagccagaaactaagagtaaccctccgctcttctctcttcctcaccaacctattcattcataaattagttcactcaataaatattcattaagagccttttatacacctgactttgttcttcaagttgaggacatgcattttggacatctcaccctgagaagaacttttcttatttaagaacccaactattataatcttgattcactaggcaccaacctatcatgtgaggcatgttccagactcgagaacaaaggctgagaacttcattgcacggcttaattttccattcataaaggatgagtcaaggatgactcacctgataactatttctattaagttgccatgtctagctgagagaaatatctccattcacaaaattcttccctcttctttcttaccactgcagtagagagacaatatgtatttaatcaggtgtctcaattgtgtgaaactcaacaactcaagtagagatggagtttggcatggatcaagaggatttgtgatgcctgggggtaggtcattcgcatatatgcatgaagtcatggaacacattgacccagctgaaggatgggagaatgtaccttagacccagaaattttactttctggcaatgtcaatgtcaaactctagacaatggaaatggtaacagaatgagatatcacaaagtattcagctttataagcattttatgagaggttattatggacaaagcaaacacagacactcattaggttagaaatgtctaactctccaaagacttatacatgtaaaatttaattttgattcatcccccaacttcctctgaccactctgaaatcccccatccccccacactctcatgcctttcctccagcttcagacagcaaccaagaaggaaactggtacaaatatctgtctgacctgatatttatttctaaatattcccttttccattgcctttccccattcatggtagggaatttcacatcaaacaagacatttctccatttgtaaatccatcattacacatgtcctcatcctcctttttctcttattttttcttcctcccttttcctctcttactctctctcccagttcctgtggtctgaatgtgagccaaaaacaaccttaatcaaggttaagatgagtaatgcttgggctacacttcaagaaaaatcaaagtgtttcatgacatctactgatgtccagagattgtaaaattctttatcaactttcttctcctcctctaatacattttcttgttatcaaccatcaatattcaagatgccccagaaatgcctttatcatattcaatactaacatttggtatactatttatgaatattgaaactttatatttttattgtgaatatacaacatttcagccacattgagtgatataggcttttatggggacacaaacaccattaagaatattattactaagaaaagtgtcaatgacagtgtccaaccatcaaacccaaaacatctttggaaatccagtctgcaaattgggacttccagatttggaagtgtctttgtttcctaggtctacaggtttctgtagttttcatacacaagtcactaaccaggtattgggagaagaagcactgacaccttcataggtggcaagtctatgcagatattgtgcctgtgagtgtgtgtgcatgtaggaagagatgagggtgctgaagagatggttactttctgtcccccaaacccatctccttggccacataggagtgggtatgttggagatattcttcaagctggtccaacagagccccaaaggcagaaggagaccagctgttggggagggaagtcctcctgtccagaggctcccaacagcatggaatgccaatatgacagccaaggtggggttcctccaggggagagctgggtaacagaataggctccaccagattttcagttccccagattcccacagccaaggttatgcatttccggtccctgagctgggacatgttggaaatcaaagcccatgtactttttatgatcttctggaccaaaggttcttctgattcaaccaactcttttgtaatcactcatttaccttaatctcttctcggtttacagccaaatcacaccatttacttgtaagaaacatctttctgtaatcatacttagctctccctatttttctctctttccctttctacttccagtaggaaccttaggcaccaggtaggccctacattggcactatatccctatttatagatgaagaaattgaagagtatagagtttaaataactggtttcacaggtaataagcattgtagtgagatttgaatctaagtctgctgactccagagcggagctcttaactatcatgttacataacctctccaacaaggaaagagaacagtgctataatcatagcatgtaccttatagggtcattgaggggattaaattaaataatttaggttcagtatgtggcacatagttagatgtaacaaatgttggagatagtgtgataatgaacatgataatgacaatgatgagaaaggaggatgaggaggaagaggaggacaagtataaggaggaagagaaacaataagtttcacctgtctgcttctgttaatagtgatccccatgtgcttatcatggaaggtaggtagtcttcatggtgggagggagcagagttagaaggcgattggagaatgcattataatttggagaaaatcttggcctatatagaatttgaagaagagtttaccttttgagcttgtgggtgacacattgcttacctccttgcttccaataggcatgtgaatgttttatttattcccccaagactgcaagtggactgatcttgggtccatttccttatcctggaagtcatgcaagtgattacagaggatggtgagatgtgaaagcggaggaggctgggaagacctggggacagtgctctgatactgataacgggtcttctcctcatccagatcttaatcttagacagtcttgaggctaattggctgtgttctaaatgccattctgttgatcccaaacattagggtgtacaaggggtctgtccccactgttggacccctctccaagggaatgatagggctggagtttaggggaagccaatctagccatcagaagacaactaatcaaatgtgctgagctctgtgttggagaggagttattggatattaattaccagaggcctcctgacgctgtgttggagaatgcaaatctaagccaaaagcaaatgtcaacatgctcatgggtgcctgtgatggctggagagagaggtccaccatatgaacagaagaggggcctagagaaggagagccatgcatgggcaagacctttaatgctagggattctgacccacgagtagatatggccttatcatgtctgcaagctcagcagtgaaattaagcaactgtacttttattttttatttttttgtgatggagtattgctctggcccccaggctgaagtggagtgcagtagtgttatacagctcactccagcctctactttctgggctcaggcgatcttcccaagtcagcctcctgagtagctgggaccacaggtgcatgccaccatgccaggctaatttttgtattttttgtagagatgggatttcaccatgttgcccaggctggtctcaaactcctggactcaagtgattgtcctgcctcagcctcccaaagtgctgggattacaggcatgagccaccacacctggccatctttgtctttgataatggacagacactagtaaggagtgggcaaaacccagccagaataaagacagagcaaaaggaatatctccctcttcacaggacacatctcttggtacctctaattcttcatttatacaatgaagattttattttataagcactaacacaatactgggcactgttctgcacattttagtcctcatttgccccaagaggtaggggctattatcccaattttgctgatgaggagtctaatgaggtatagataaagtaactggcccaaggtcacagtcgccaattcttaaatcaactttatatatatatatatatgtggagagagacagcgagagagagagagtaatatttatatatcacatataatgaaggaaggttcttgaacctttaaaagatgcttatgccaaacacacacataaccatagaactttcctggtaaaatgtttttacttttgctaacactacttccttctaccttttcagcaacccacatggccaacacacatgtgactcactgcaatgttgcatgaacacaacacaatcaaatgaccatttttttctgggcactgtgagtctgtatttgcctccctaacacttggcacagtttgacattgcttagcaacgtgttccccctactatcctggctgtcattgttctgaccccagcttgaaggggtaggcattccaccacctgcccccacctcctgtccagtcttctgcccatgccaccaggtcctggtcagatggcatctcaggaaaggaagagatttgtgtgggatgggcaggtcttcttgatctcctttgaggaagctgggctttggctggattttgaaataggtgtaggattaaggcaagtacaaattctacgagagggttaatcctaattttggaaatggtaagaaaggacatagtggaaacaagtctagggagacagaggatccttctacagatctaggggggaaagtgtggctggactggaaatcaacaggccgagggaaggacaggagggaagctaaaaccctgaacataccggcccctcaacacagcaggaaatgggggagaagggcattcacctatgtcccaggactgaaatgagagataagcctgctccactgtgagacaaagagtaggattaaggggccccaaagcccttactcaggcattcctaacttcttttttttttttttttgagatggagtctaactctgtcgcccaggctggagtgcaatggcaccatcttggctcactgcaacctctgcctcccaggttcaagcgattctcctgcctcagcctcccaagtagctgggattacaggcgcccgccaccacgcccagctaatttttatatttttagtagagacggggtttcactgtgttgaccaggctggtcttgaactcctgacctcgtgatccgcctgcctcggcctcccaaagtgctgggattacaagcgtgagccacagtgcccggcccctaacttctttttatgccgtggactcctctagaagtctggggaagtaaactgactctatttcagaatgatgttttcaataagacagtataggaatacaaaggaaaacaattaggttgaaatacagttatgaaagcattttttaaaaatatgtttgcttccctgttaacccattaaatcagtgcttttcaaactatctgtcgaaaaggacgaatttatttttccaatccatcttggactgacaacttttataaaataaaaatatgaaataaaaaagaatgggaaatacaaatcccattattctcagacccaaagtatattaaattattgtgtcaaattgttgtaaaagtttctaaatcttcctctcaatgcctcttcttacttggtcatgaatctgtaagagttcatgggctggcacctctttgtgaaccattctctgagcagctctctattcaatacaagacctagctctaggtctaataatgactctaattttgaagtcgtggttaacataaacaatctgtcactgacatgtgatataaaaatatctgtgaattcctttgatgacaaagttacagttactgctaattccattaaactgtgttagctacttccataatagaaggaaatgctaaaattcaaccataaatccatagaaatgaagatgtaattctttcctgtccaagtccacaggccccctaaaattttacttctagacccacatggagctttaggttaggggcccctgccttagacaatggaaggggcagtgaagactagaaaaggaggaaaatgacccacactatgggggaggctctccccaaaacttcagcctttttgcatctggggtcacagatttatagggttagcatgatggttctgaccaggggaggaaaaaccctgcacatggggtagcttaggccctggcttgaggtaagggggagctcagcacattcgagctggattctattggaaaccagaagcccaggcaggaaaggtaagataagtggcagccaccggggcaggcggagaagccgacaacctgaacaaggcttgccagctgtcttggcccctgcagctcagagagacatggtggcctgagttgcctgtggggggtctaatggagacccctattattttcagaattgtatttttcaccattatgctcatccaggctcagaaccatctctcctcactcatggaccccatcattgaaggttaccttgtgccaaacatggaggtaaacatgcatcttctagttcaatcctaaaagccaccctgtagaatatgtgttctcatcattcccactttacaagtagggaagaggttgaagagcacactgctaactggacagtaagcagcattgctgggacttccattgggaccctctgaaggcagagcatgagaggactgtgcgccccttacatgccaaatcctctgttcactcggagcactgcaggcaagttctgctaagcacactcaggggaattagatctcctggttgggaagtgcaaggaaaaaaatagcccttcccttttgacatttcttgtatagtctgcattttacaacagcacacattttgttttactttatttaaggaatacatatctacatgatgccaacaacatgagatggctggctgcgggatggctggtgttggcatccaggtccccactgggcactggaatgtttccaagggcacctaagggcttgatgtagttcaagattctgcaattggggccaacagtgcctcctagagggcttggggctacactgcttttcccagggtcaggctttggcggcagttgaggtgggtagggttttgtttcacagaaaatggggcagcacctggaagcagccaccacaaagccagagaacaccagaggcaaccaagacttaattcatccagcaggttggcaggtagctcatgggctaccttgattagctaccataagtaaagagaagaaagaaatgcccaagggctgtcccagagccatgttggagagtgctttaggaccttgtccttcaggctttccttgggtcctaaggatcaagggacaaggttaaggctaaatatcctcagtcatcaaaactgagacagtcactgcctgtgtgatgctcacactgtgtgatgctccacatttgcaggtggggactgttgagaggatcaaagtgaaagcattttgtcttcatggttaggtctgattattattgtcaatatataaagcacagcctgttttctaggctctgtctctttcttttctcactgactatcaggaataggaataggcatggttggtccctataaaggtttacaggttccttattttaaggtacagcagtgggagcccacatagctacaaaggctcaatttcaaaggaagctgctgtccactctctgggaaaccagggattctgtggcaaaaaattcttaaaataaaagctgagaggtgagattatggacaaagaacaggaacaagacaaggatacctgttttcatcactgctatttaatgttgtaccaaaagtcctagccagagcaagtattcaagaaaaagaaaaaaaataaaagatagacatattggaaaagaataaataaaactatttttattcacagatgacatgatcctattatagaaaactccaaagaatctgcaagaaaaaaagctactagaggtaataagcaaattctgaaaagttgcaaggtacaacttgcaacaccccaaaataatttgtgtttcaataaaccaacaatgaacaatctgggaaggaaattaagaaatcaataccacttataatagtatccaaaagaataagatgcctaagaataaatttaatcaaggaggtgaatgacctgtacaatgaaagcaataaaacattgctgaaagaaatcaaagaagacctaaatatatgaaaagacatcttgtgttcatggattggaaaagttaatattctttagatgtcaatactacccaaagatatgtacagattcaatgcaatcccaatcaaaatctcaatggccactttttaagaaatgaaaaagtcaacaatcaaattcatatggaattgcaagaggctctaaatagccaaaacaatcttgaaatggaagaacaaagttggaggacttacacttctcaattttgaaacctactacaaaatctacagtgatttttttttttttttaagtgtggtactgatagcagtggtggcccacctggagcggctgctgggaagatgctggctgcaggaaaagaggcgtggccagggctgcaggctccacggagagggtgggagccaggaacaggccagagccctatccccttccaagttggtggcgtaggagccctgcccttccgggcacagctgcaaccgcccaaccatggccgtggacctgggcatccctccactctcaggggcccaggaagtccccctctgcccctacaggcttgggagtgcctctttcccctgcttggcctctccctactccaggcacccactctgatttcaaagcaaagttgaggccgagcccaggcactgtcatgacctggccgggtgtgcatgcacttggggcagcactaacatgccagacccctgccacctcagcacccttccgcctcagccccctctgaactttgggtggccacaagcacaagagtgaggccgaagaggggtgccaagcgtggctcaatgcaggcctgcaggcactcctcagaacaaacagctcaggcaccgtggatggcatgatcaatggcagcaggaggcagacagactcctgagcagaaaggggctggtccccatgaagccccgtcctcaagccagggatggcctgaaatttgaggggtgggctgtcagttctgggtggagtcccaacctggagaagttacggtttttctgggcccacccatggctgcccatggaccagtcagcacacacgtccccacttctgaagcccataaacacctcaagactcagccagactcacagagacatcggggatgaccaactgtgggcaggagataccaattcaggtctcctgagagctgttctggtgctcagtgaagttcctctctgccttgctcaccctctagttgtcctcgtacttcattcttcctggacacaggacaagaactcagtacccaccaaatggtgggactgaaagagctgtaacacaacagggctgaaacacgtccctcactcaccacgttcgttgtgtacattgagaaggagagaagagctacagcccttcttgggagcccaaacctaggggatccccaagccagggctatgacaccttctttggggctctgcagttcctggcatctccaagcttctgggagccaccacattcccttcatccagatgaaggtgcccacgtgaaagccacatgtagtacatctggtccagctgcagccttgtacagagctggcacctgtagctgcctgccccactgcagcagctggcatgcctggctgtgtgcagtggctggaccccgcgctcgctccctcacacacccctcgccactctatgcctagcttgtccttggcaggtgtgggatctgggctggtagcacaagctaagcacagtctgctgggccatgtgggcagaacaagcccagcgggcacgagcaatactcaggcagaaggccccactggccacagaggtttccagctggtgaaatgacaacccaaggatcccgtgacagtattggcataagaataaacatatagaccaatgaaatagaacagataacccagatattatataaacccttgcatatacactcaattttcaacaagaatgccaagaccatttatggggaaaaagcagtcttttcaacaaatgatgttgggaaaactagtatccatatgcaaaagaatgaaattggatccttaccttatataatacacaaaaattaaatcaaaatggaaaaaagatataaagttaaaggctaaaatgataaaactcttagaggaatatacagaggtaaatcttggtgaccttggatttggcaatagacacttagatctgacacaaaaagcacaagcaacaaaataaaaaatagttgaattggacttcatcaaaattacaaacttttgcacatcaaagaacattatgaaaaagtgaaaagacaactatagaatggcagaaaatattttattttattttattttttattttattttattattattatactttaagttttagggtacacgtgcacaatgtgcaggtttgttacatatgtatacaggtgccatgttggtctgctgcacccattaactcgtcatttagcattaggtatatctcctaatgctatccctcccccctccccccaccccacaacagtctccggagtgtgatgttccccttcctgtgtccatgtgttctcattgttcaattcccacctatgagtgagaacatgcagtgtttggttttttgtccttgcaatagtttgctgagaatgatggtttgcagtttcatccatgtccctagaaaggacatgaactcataattttttatggctgtgcagaaaatattttgcaaattatatatccaataaaggtctagtgtccagaatatataaagaattcttacaactcaagaacaaaagaaaacaaaccaacttaaaaatgggcaaaggacttgaatagacattttcccaaagaagatatatgaatgtccaagaaacacatgaaaagatgcttagcataattagttattagggaaatccaaatcaaaccctcaatgagctttatatccactatgatggctataatcaaaaaacaaaaagtggaacatgtacattgttagtggaaattaaaaatggttgaacaactgaggaaaacaatttggtaattcttcaaaaagttaaacatagaattaccacatgaccccacaattacactactagatatatacaccaaaatactgaaaacaggtactccaacaagttcatgtacacacatatccatgacagcacaatagccgaaagatggaaacagcacaaacccccatcaatagataaataaataacaagttgatatatatacgtaaatggaatattattcagccataaaaagggatgaagtattgatatatgctacaatgtggatgaacctccaaaacattatgctaagtgtaagaagtcaggcacgtaagatcacatattgcatgattccattcatatgaaatatccagaagagataaactcatagagacaggacacaaattagtggattttggggaccatagggaggaaatcatggggagaaacaacttattgggtaagaggttttactttggagtgatggaaatgtttcaaactaggcaaaggtggtagttgcataatatcatgaataaactaactgccgctaaattgttcactttaaaatggttaattttatgctgtataaatttcacctcaataaattatcttaaaacagaaaaagcaagagctaaggatttgggattgttgaaccattgcctcctgtggtgtagtatataatacgtaacaattttttaatccacaaaacaatacctagtggcaggtcagagaacttccctgattttaaaatagtgatgagcataaacaatattttgggacagctgtaagaaccataatacaatgaaggacctgtaatttctactggtagcaaagtcacaggtactgttaacagttgcttacgttcacactaaaaggaaacactgaatcttaaattataggttaatggaaattaaaattgagaaaaaattttttattttcctagattatgagcctctaggctagaaacccttgttctagggtggtaaaaattggacaaagatgacaggaactcactacaggtaactgtagtaactgctgttcccaactgggactgacctcttaaatcaggggtcagtgaactacagtccccaggccaaatccagcccaccagctattttttcaaataacatggttttggaatgcagctgtgccttctgatttacatattgtccatgactactttcacactctaacagcacagttgagtagttgaaacagaaaccatatggcctacaaacctaaaatatttactatctggttctttcagaaaatacggttgctgatccctgccttcaaggaatgctggccagttttctggagactcccagcctctcagctgagaccacaggtagttggtcagactctatactgcaggaggtaccctgtgcacatgagtaagtagctttgacatctaatatgcctctaattggaaatggcaaatgttcactaatacaaaaaaattaaaattaaaaatttatctttcacaagcccaagcaaaacagagtaaatgtactccaatgtgtccctgccactaagtacaactgtcaaacctagacagaattcttggagcaactatttgaggactctgaaaagcaaatagcagcaggcagatggggaagatcagtatttgaggtgtgcattagtgccaacagagagagatccaggaaaaatctcctagttcttgataaaggagtgggacatatctcccaatgcttagacagagtagggaaattccttgctgttattgtttcttttctccattctctcacacccaataatctaattgtggtggtggccatgacaataatggcagtggggctgcaaaggaacctaaaactctaaggaagcgtgtactagagttcttcagagacaccgaaccaataagagatagatagatagatagatagatagatagatagatagatagatagatagatagatagagatttattataggaattgattcatgtggttatggaggctgtcctctgatacatcatctgcaagccggagaaccagaaaagccagaagtgtaattcagtctgtgtcctcaggcctgagaaccagggggaactgacagtgtaactcccaatctgagatccaaaacctgagaaccagggggcttgggatgagttgctggtggtaagtcccagattccaacccaagaactaaaagctctgacacttgggcttagacctgctatgataggattaacgtcactataagaggaagaaacaccatgtttcttctccatgtgagaatacagcaagaaggcagccagaaatactgccagaaatatggcaagagggcagtcaaaaggcaagccacagaaggccctcaccaggacctgaccatgctggcaccctggtcttggacttccaatcctttagaattatgagaagtaaatgtgtttaggtcacccagtgtatggcactttgttctagcatcccaagctgatgaaggcaaggcatttcaccaaaaaggatataaagattatcaaaaaccacatgaaaacatattcagcagcatcagtcattggtgtaatgctaaataaaaccacaatgagatgctacacacttgttataatgtctccaataaaaaatactaacaataacaagtgttgatgagaatgtggagaaattggaacctcatatgggacagccactctgaaaaacagtgtagcatcttcttataaagttaaacatacacttacgatgtgatccagcaatcccatttgtaggcatttactctagtgaagtaaaaatttatgttcacaccaaaatctgtatgggaaggtttgaatcagagctatattcataactgctaaaaattgacaacaatccaaatgtctttcagtgggtgaatggataaacaaactgtgctacgtcaatcaatggaatactacctagcaattaaaaggaacaaacaattgatacatgcaacaatttgaatgattttcaaaggcattttgttgagtgagagaagtcagttttaaaaggttacatattgtataatttttaattatgtgacattcttgaagagctaaacattaaagtaacagcatagttcagtggttgtcaggggttgacagggagtcaggtgttacatcaatagaatagaaggagggaggttttttggtttttgtttttttaagtcatgcaaatgtctgtattctgtttgttgtggtagtggcaagaatctatatatgtattaagattgacattgcttctgaatcccaaaaagtcaattttagtctacgttaattaaaaaaataaaatgttagtctccctagaagtaatgtttgcaagatagcagaataaaagtttccagggctcattctctcacagaaacatcaatgtgaacaactattcatgcatgaaaataccttcacaagaactaaggaatccagatgagagattatagtacctaggtggagcatggaaataaaaagagacatattgaagagagtagaaaggatagcttcacccatgttaccccttccccaaacacaggcaacacagtgaggagagagattctctctgagttagggaaagagagtgaggtgagcacccaatttcatcatggaccttagcacccggcccactccagtaaatcccagcacaggcttgcctctgcaggacaagactccaggcctaccccatgaccaagccagcccctgcaactccaggttccagacctgccctcacaaattcaggcaccaagccagcccctgtagacccaagcaccaggccaacccactggaggatttcagcagcaagcttgccaaaacttcaccagacaggcttcctagaatctctggacaggcttactggtgaaggaatttccctgctaaatccagtctgcaagaatggaaggggtgcctgcttcttcaaatacacagacaccaatgcaaggccacaaggataaagaataattggagaaacatggcactgttaaggaactaaataaggcaccagtaacagaccctaaagaaatgcagatccacaactgtctgatgaagaattcaaaataactgtcttaaagaagttcagtgagctgtaagagaacacggatagacaactagaccaaaaaaatcaggaaaacaatacatgaacaaaattggaaattttacaaagagatataaaccacaaaaaagaaccaaacagaaaattttggagttgaacagcacaatgattaatctgaaaaattcaataaaggacttcaacagaagattcaattaagcagaggaaaaacaatcagtgagtctgaagacaggtaatttgaaattccctagttagagaaacaaaaaggaaacagaatgaaaaaaagtgaagaaagtctacaggacttatgggacaccatgaagcaaaccaatatgataattcacatgatgagggtatcacaaggagcagagaaagagaaaaggggagaaagtttatttaaaaaaaaaacagaagaaaaaaactaataataaattggaaataaatgaaatatagactagaaacacaatagaaaagatcaataaaactgaaaatagtttttaaaaaaataaacaaaattggcaaattttagctagattaacttaaaaaagagagaagacttaaaatcagaaatgaaaccataaatattacaactgatataacagaaatatgaaagattgtaagagactgcaaagaacaattataccctaacagattggataacctagaagaaatgaagacatttttagaaaaatacaagctgccaagactaaatcataaagaaatagaaaaatgaacagatcaaaaatgattaaagaaattgaaaccaaaaacctcacaacaacaaatccagaaatatgtggtttcattgataaattctaccaaatctttaaagaagaattaacttcagttcttcacaaaatcttcccaaaaatcgaagaggaggaaacacttccaaacttattttatgagaccaggattactctaatattaaagtcagacaaaaacactataagaaaagaaaactacaggttaatatccttgatgagcagtaatgcaaaaatcctcaacaaaatactagcaaactaaattcaatagtacagtaaaaaagtcatataccatgatcaagtgatacctctaggattcaaggatggttcaatatacacaaattaataaatgtgttacaccatattaatagaaagaaaaataaaaatcacatgattatctccatagacacagaaaaagcactggacaaaattcaacaacctttcattataaacacacttaacaaactaggtatagcaagaatgtacttcaacatagtaaaggccatttatgacaaacccacagctgacatcatactcagtggtgaatagttgaaagattttcttgtaagctcagaaacaagaaaaggatgtccactcacatcacttctgttcaatacagtactggaagtcctagacagagcaattaggcaagaaaaagaaataaaaggcagccaaattggaaaggaagaagtaaaatgatctctgtttagaaatgatatgatcttatatatagaaaacgctaaagactccacagaaaatgttagaactaataaaaaaactcagtaatgttgtatgatacaaatcaacatagaaaaatcagtgacatttctatacactaacaacaaactatcaaaaaaagaattaagaaaataatcccatttataatagcattaacaatacttagaaataaatttaactgaaatgaaagatcatcacccctgaaaactataaaacattgatgaaataacaggaagatagcccatattcatgaactggaagaattaatagtgttaaaatgtgcatacttacccaaagcattctgaagatttattgcaatctctatcaaaatttcaatgctattttttattaaaatagaaaaaacaattctaaaatttgtatgggaccacaaaaaaaacttgaaaagccaaagcaatcttgagcaagaacaaagctggaggcatcagacaaaatgtcctataaagttatggtagccaaaacagcatagtattgtaataaaagcatacatacagatcaatggaacagaatagagagcccagaaataaatccatgaatttacagtcaattaatctttgacaaaagtgccgggaatatacagtggggaaaagaaagtctctttaacaaatggtgttggaaaaactggatatcataatcagaaatactaatttgcaccctatcttataccatatacaaaaaatcactcaaaataagtttaatacctgaaactataagattcctagaagaaaacaaaagaaaagacattggtctggatggtgactttgagcacaggcaacaaaagtaaaaataaactaatgaaatgacatcaaactgaaaagcttctgtgcagcaaagaaaacaattcctaaagtaaagagacaacttgtggaatgggacaaaatatttgcaaatcatatatctgataaggggttaatataaaaaatatataaggaactcaaacaactcaatagcaagaaaacaaacagacatttctctgaagaaaacatacaaataaccaacaggtatatcaaaaaatgctaaattgctgatcaccagggaaatacaaatcaagaccacaaagagataacacttcatacctgttaaaatggctattgtaaaaaagacaaaagcgaagtgttgatgaggatgtggagaaaaaggaaccctcatgcactgttggaggaaatgtgcattggtacagccactatggagaactctacggtggttccttaataaattgaaaacagaactactatatgatccagcaatcccacttctgggcatatatccacagggaaatgaactcagtatctcaaagagttatctgcaatgttccttgcaacattatgtacaacagccaagatatgaaaccaacctaagtatccattgatggaaaaatgaattttaaaaactgtggggtaattaattatagatatatctctatctatgcctctctctcttttcctccctccctctctctctctctatctctttctctctctctctccctctctctctcacacacacacacacacacacacacacacacacacacacacatatacacatacacacatactggaatattattcagcctttaaatagaggaaaaatctgccatttgtgacaacaaaggttaaactggaggacattatgctaagtgcagccagttagacacagaaaggcaagttttggatgatgtcacttagatgtagaatcttaaaaagttaaactcataaaagcagagtggaaaattggttaccaggagctggagagtcgggggatggcgagatgttggtcaaaggttgcaaagttcagttatgcaggatgaatgaggactagagttctattgcacagcatgcaaactataattaatgtattgtagacttgaaatttattaagataacagatctaaatgttcctatcataaaaaataaaactggtaactctgggagatgatggactgtggtaatcacttcacaatgtatatgtacatcaacacattacattgtacatcataaatacatacaatttttatttgtcaattttacctaaaatttacctttcaaaattcacaaaatgagtaaaacagaaatttgaatattttaaatttcaagtttttttaaagttaatagcattcatacttctcaagttattgaagattaaaactctactaacagccgggcatggtggctcatgcctgtaatcccagtactttgggaggctgaggcaggtggatcacctgagtttgagaccagcctagacaacgtggtgaaaccccacctctactaaaaataccaaaaatagccaggtgtggtggggcatgcctgtaatcccagctactcaagaggttgaggcaggagaatcacttgaacccaggaggcagaggttgcagtaagccaagattgcaccactgcaccccagcctgggcgacagagtgagactccatctcaaaacaaacaaacaaacaaacaaacaaacaaacaactccactaagacttttgggacaacctgtacctacctgacctgcctttccatctttaatgctcttctgtgctccccagccccacttcaattgcgtactggacaaagtcatgactgccaagtagggaaccccaggatctccaggatctggcatctaaccacatctccaaccctacctcctagaactctttgcctctactctccctccactgccattggagccccacagattctgagttgcttattgaatctgcatctttgccagtgctatgctttttaacaaaacgcaggctccctgttccttccatcctcttctttgcaagtttcaactcacatatctcttccttcaaatgagccttccctaaaaaacaatcttccctacccttccagctgtgctccctcaggatcctgtgcacgtgtctgtcctgggcttaactcacaatgtcactgccctatgattctgtctttatgagaaagtttctccttctccactgtgagatttcaagaaacgggctcagaagtgagagaataagtgaaggaggaaaaaaaaaaaaaagactcatgaatttaagaagcaaacatcaagggtcttagtaattgctattatttgtgtcttataattggcttgaccaactgagtagctggtcaccgttcttccatttattagttgtgacattgggaaaaccctcttacttctcagtgtgtttcttgtctctcaaataacaaaacattcagcccctgttggcatggtaaatttggatctgcaatcaaatgaaattaaggatgtgaatatgctttcacatctaagctctacacttgcaagatgtttttactgcaagcttctgaatcacagtataaaaacatgaaatttggaaacagaaaaggctaggagataacaaagttgaaatacttcattttcaatggcaaatacatgggatcaacccaaatgcccatcagtgttaggctagataaagaaaatgtggtacatatacaccatggaatactatgcagccataaagaagaactagatcatgtccttttcagaaatgtagatttctgaaatctggagctggaggccattttccttagcaaactcatgcaggaacagaaaaccaaataccacgtgttctcacttataagtgggaggtaaatgatgagaacacatggatacatagaagggaacaacacacactgggggctacctgagggtggagggttgggggaggcagaggatcaggaaaaataactaatgggtagtaggcttaacacctgggtgataaaataatctgtacaacaaactcccatgacacaaagtttacctatgtaataaacctgcacatgtaccctgaacttaaaaagcaaaaagaaatccttcattttattaataaggaaatgaaatatgagtgaaaagagacttatccaagatcacgcaatgaggcagatttagagctttctcaaacctggggctactggctctttccaaaacctcattcttattttttgtcttatttttcttctttctttctttttttactttcttattctttcttcagcacagcccttcagctctttctttcccccaaatagaagaatcactctttttcccaccaaatagaagaatagccgtagttaagtgccgttgatctttgttgactgaaaatctaactttgtgcatgcctacaccatgtccccagctgccgtgtacttgttagcatggatacttactgggccaagaggcacacaggaagcccctgaaagtatttactccaaccagacccagggaaaaatgaaactgggttgtcttttagggatattgtctttcagggactaagttaccatggcaagcagagatctactgccttggcttacaaactgttcccctgtgaggtcttccacaggcaaattgctctataaatctatgttgtttaattttgagtaaagggatagaaaggttccctacgagaaaatgccggggaaagaaagaaacccaaaactgagttttccaaaagactagatttaaatctccttagaacattgttacttcttcgttgctcaaagagtgtctttgtaagtcaggtcagcggcggctgtcacacgctgtgggggaagatgtgtggcatttcatcagaggggcagctcaagcagcagactcagatcaggaaattagaaatgtttccctgcctgcccaagaaaggctagattcacagttttggttcagacgtgtcccagaattttagccaaccatggaagtctttggagctgaaaatcaagctgtcaaaatgtcttttctaagcatctgctgtgtctagtcctgtgtcaaatgatgacagcgatgttatcatctccactcacatgctttcctgtgccagtcatcccactgcgcactttgcgtacatttgctaatattataatgaccctttgagataaatattattattctcatttttcatacaaagaaagttagcatcctcaaaccaaacagcttgccatcgttcatatatggtcttttgtacctggcttctttcaatcagaatgttttcactgttgtagcatgcatcagtagttcattccttcttattgccaaataatatccaattgtgtaacccatttttaaaatctattcatcagttggggaacacatgggttgtttctactttttggctatcatagttaattctgctaggaatattcatgtacagtttttgtatggacatgtgtttttatttattttaagcatatgactaggagtggaatcactgggccacatggaaattctataacattttcaggaactttcaaacatatttccaaagtggttgtaccattttacaatctcaccagcaatatattagcgttttaagtttttcacgtctttgctaatatttgttattgtttgattcattgataatagccattccagaggatataaagtgatatctcattgtaattttgtttgtttgtttagagacagtgtctcactctgttgcccaggctagagtatagtggagcaatcatagctcactgtaacctcaaactcctgggcccaagcaatcctcccacctcagcctcccaagtagctaggactacaggcatatgccaccatgcctagctaattttttaattttttgtagagatagggtctcactatgtgcccagggtaacctcaagctcctggtgtcaagtgatccatccacttcaacctcccaaagtgctaggattacaggtgtaagccactgtgcctggccaatttgagcatttttaaatgttctcattgatcagttaaatttcttctttggggaatgtctattcaaatcctttgcccattttaaaattgggttatttgtatttttattgttaagataactcttaaattttatttattttttgagatggagcctcactctgttgcccaggctggagtgcagtagcatgatatcagctcactgaaacccccacctcctgggttcaagcgattctcctgcctcaacctcccgagtagctgggctttcaggtgcatgccaccactcctggctaatttttgtattttagttgagacagggtttcaccatgttggccaggctggtcttgaactcctgacctcaagtgatctgcatgcctcagcctccaaagtgctgggattacaggcgtgagccaccgtgcccagcctaagataactcttgagaagtcttacatattttggatatagaccctttattatatgtataatttgcaaatattcttttctccattctgtaggtaaatccacagagacagaaagtactaatgagtttcaggaggtaggagggaaagaggagtatctgctaatgggtatagggcttcttttagtactgataaaaaaatttctaaaattagtggtgaagtttgcacaactctttaaatatatttttaaaacatagaattgtgtactttaagatggtaaattttgtggtgtgtgagttatatctgcataaagttgttacttttttttaattgaacagcttggaagtggtaggacttggactggaatttaagtctaccaaactctaaagtctaactatgttacacagccatggggagagggaacaatgttggacagaaaaagtacagagaagaagaggtggaatacacagacatcaagctactcacaaaactaattgtggagatggatctagatgatgcactgcatttacatatataccctccttcctgaatgacaggaagagattatttttaataaaaataaatttaatgtaatttaagtaatgtcagaaaggtaggaagcattcaacaaagaaaagcccaggactagaagccttcatgagtgaattctgctaaacacttaaagtaaaattaacaccaacatttattaaatgctccagaaaaatagaagaagaaacacacctaacctcatattatgaggccagcatcaccctgatactaaagccagaaaaaggcaacacaagaaaagagactacaggccaatatccttgatgaacacacatgcaaaaatcttcaataaaatactagcaaactgaattcaacagcacattaaaaggatcatacaccatgatggggtgaaatttatccttgagatcaatcatggtttgatgtacaaaaatcaatcattgtgatacaacagatactacattaacagaatgagagacaaaaaccacatgattatttcaatagatgcaggaaaagtattttgacaaattcaatatcctttcatgataaaagaaactctcaacagaataggtatagaaataacttatttcatcacaatagaggcatatatgaaaaacctacctctagcatcataatcaatggagaaagactaaaagcttttcctctaagatccagaacaaggcaagggtgcccagtcttgccactgctattcaacatagtactggaagtcctagacagagtaatcagacaagaaaaagaaattaaaagtatccaaattggaaaggaagaagtaaacttatctctgtttccagacggtatgatcatatatgtagaaaatcctaaagattcactaaaacaaaagttgttagaactaataaacaaattcaataaaggatttgcaggatacaaaatcaacatacaaaatcagtggtatttttatacaccaacaaactatctgaagggaaattaagaaaacaattccatttattaatacattagcaatggcagcagcaacaaataaaatatttgggaattaagcaaagagatgaaagacctatataccaaaaattataaaacattgatgaaggaaatctaaaaagacacaaataaaggaatagttatcccatgttcatgaattggaagaattaatattgtcaaaatcttcttactacccaaagtgatatacagatttaatgcaatccctatcaaaatcccaatggtatgttttacagaaataaaaaaaaatcttaaaattaatatgataccacaaaaagccctaaatagtcaaagcaatcttgagtaagaaaaataaaattgaaggcatcacaccacctaattacaaaatatactacaaagctatagtaatcaaaagagtttagtactggcataaaaacacatagaccaatggaacagaatagagaacccagaaataaacccacatatatatgattaattggcctttgtcaggagtgtcagtaacacaaaatggaaaagaacagtctcttcaacaaatggtgatttttaaaaatctggatatccacatgcaagaaaaaaatttaattagacccctatttcacaccatatacaaaaattaactcaaaatggattaaagacttaaatgtaaacttgaaactgtaaacctcctagaagaaaacataggaaaaaccaatcttgacattggtcttggcaataatttttggttatgaccccaaaagttcaggcaacaaaagcaaaaatagacaagtgggataacatgaaacccaaaaacttctgcatagcaagagaaacaatcaacaaaatgaaaagacaacatatgatataagaaaagtatttgcaaacctacatccaataagggattagtatccaaaatatagaaggagccactacaactcaatagcaaaaataagcaaaaagcatgattttaaaatgggcaaaggacctcaatagacactccatgaaagaacaaatttaaatggccagcaggcgtatgaaaatgtgtccaacatcaattatcagggaaatggaaatcaaaaccacaatgaaaccctacctcacagctgttaagatggttacttatcaaagaggcaaaagatggttggtcaggatgtggagaagaaggaaaccttatacattgttagtgggaatgtaaattactacagccattatggaaaacagtatggaggttcctcaaaaaaattaaaaatggaactagtatatggtacagcaatcctacttctgcgtgtatatccaaaggaattgaaagcaggtttgtaggccaggtacagtggctcatgactgtaatcccagcactttgggaggcagaggcaggtggatcacttgaggtcaggagttcgagaccagcctggccaacatgatgaaaccccgtctctactaaaaatacaaaaattagccaggtgtggtggcacactcctgtaatcccagctactagggaggctgaggcgggagaatcacttgaacatgggaggcagaggctgccatgggctgagatcgtgccactgcactcccacctgggcgacagagggaaactcagtctcaaaaaaaaaaaaaaaaaaggccaggcatggtggctcatgcctgtaatcccggcgatttgggaggctgaggtggttggatcatttgaggtcacgagtttgagaccagcctggccaacatggtgaaaccccatctctactaaaaatatgaaaattagctgggcatggtggtgcacacctgtagtcgcagctactcaggaggctgaggcaggagaatcactggaacccgggaggcagaggttgcaatgagccaagatcgggccactgcactccagtctgggcagcagagccagactccatctcaaaaaacaaacaaaacaaaaaacaaaaaaacccatgtttgcaaagagatatctgtactcccatgttcattgcacattattcacaatagccaagatatggaaacaacttaaatgtcctttgatggatgaatgcataaagaaaatatggtgtatgtgtacaacagaatattattcagccttaaaaaggaaggaaaccctgccaattgtgacaataagaatggagctggaaggcattatgctaagtgaaataagcaagacacagaaacagaaatactacatgatctctcttatagatggaatctgaaacagtcaaacttacagaagtggagagcagaattgtggttgccaaggactgtgggggaaggggaatgaagtgatgttggtcaaagggtacagagtttcttttatgcaaaatgagttatttctagagatcttaggctctgcttctggggcaatccaaactaagacaggtattaaatacaaatttaaaaggtttatctttaaagtcttgcaattgaattgggaagatatttacaattttacacaatattaggactcttaaatcagccatatcttaaagtgtttaattaagttttaccctctcattagccattgacaataaatcagtgtagattggtacatcatgggccatttaacattccttggcatttatttgcaacagctcattattatccaaaagtcagctgctgccaaatttcctctccaataggcaaagaaattcccagttggaaggtgagctgactaccaactcaggctgcctgcttattgggtttcatgcatccctctcctcccgcccttcctcaactgggcaatctacaggacctccaaagtgccttctccttggggaaggatgtatatttctcctaagagtggttcagaaagattaatgctaaagaaacttccccagtttctccctctttatcgatttccatcttctaaagatttcagcactttgaagcttaatcaatttgtatcacagttagttccatgtccatgttttggtcttttagttctttaacgaattcctctccttttgaacatgaaagaggcagatacttagctttaagtttccatctgccttcaagtcccattttgttcagagaaattaatataatctggggaaaataaacctaaaattatttggaaataggactcatgtaatttcttatacaggcaattttttgctttgacatccagggaactttgaatgtttgcctgagttcagcttgtttggaggtaaggcatctaaactgaccctaatttaagcaaaagaggggtttattgaaaatatgcttggtagtttatagaactaaagagcttaataaaccagtctctggaagtatgtagtcaggaaagattcagggatctcacagacagaaattcccagacttcatcattacactgttaccttcatacaactccagaaccaaccatcttacctccctgtgcattcccactcagatgctcccaagagaaggaatttggcctagtttgggcatgtgctcaacacctgtggtcagtagagcaggagtgtgggttatcctctgatgagtttctctaccagaagagaatattggtggcagggcatgaaggaaagggaggggggcctgcaattctcccaaagaaagagatgctgggcagatggaagccatagatatccactacatttattcctcagctatccatttgtccatatctccattcacagaattttacaaatgctgccatctaacattacaaaatcataccacgtaaaccttcaactgtactccttcctgaaagtctcagccagctattgcacctagaatcaaggcctccaggcccctgttctcccaggatagaatctctaagtgcatctcatatctctttaccatgtactatttcagtacatgctggccctgacttccaactgccagcactctttgcctgtaggctctctctggccactggagacttctttgaccatttttggggtagggaaggaaatgtctaaaagttatcaccactttgggagcagccctcaaccaatgactaaaggaactaatagacaaatatatgtttttcctcaccctttctggaactattggaagaactcttaggtgtatattctacagttttccagagtgcttaatcctttgggattatgctccagttgctcacactgataatatgcacagtagtgtatcctttattgcctgcactttctcttcctcaatctcatgttcccactgtcctactgatacttcctagagtcacctcttaaatggcatgaacccaaattcttgcctcagtgtttgcttctatgttattgggtattttttattcatcctctaggtctgccataataccatctcacaattttgtaacctatggactaaaagatagatttcaccatgactaactggtctttatgcagctggtcactatgccgtagctattatgtgtgaatcctgcccatttgatgttgttttgcccttattcagtctttcagtcagtaggattccttccaagtggagtaaccaatgtttcactcctgaaagcctctaattcctcagaagtccttcttttgctttttctgtgtctttaacaggacattccaccattttatgaggtcagctacttctgggttatagggaacataatgtgataagaccagtgtatcccatcagctcattgtcttccattttgcacactgaggtgagtccctatttaggataagtgtagtatggaatagaagccataatagtgaacaaggctctcagtacatccgtgtgtaagaacagaaaactcagctcccagacgtgtttattaatagtttgataagaaaaataatgactgcatgttctgtgatgaaaagggtccagtggaattactggctaccaggtattcagtatggcttcatgtaagggtcttgaggataattgttttgctgccacattggggtgtcagcagtggtggcaagggaaagtttatttcgctatagcttccctggtcatgggcaatgtgagcaacaccacaggtggctggggcaggtggatgactgacatccagaggagataagaccatccttgtttggttattaaagtattcttctgaagtgagggatttctagtactatgtatgcaggatagaaatatgctcatattttggacccacatatgtttcctgaacttccttatagttcatgtttgaatcattctctgagttcctaaccttcacccaaaaaattagctactgcccaactgtctgtgtaaatccttacaattgtttgtctctatgtccaggacaagtgggaaataatatatactgtaatcattaaagttctgcccacagaaaaatttcccattttttattatgcttcaaagctacatctgagtagggctctaataccactgtaatccatggtatattgtacatagtcacctgcatagtcacctgtacacaaagctctaattttttcctcattagttagccaatcataaggagctcctcatgtgtccaggtgcagattaagggaggggagcagagagacaggaataggggttctgagcgggtttgcaacccacaacttctgaaactaacctgcacgttcaggacctgttgaggcttgatctggcatgtatctcttccccttgatgacagagcacgctgaagatgcctccctttatgatggattgaataaaattgcatccagatataatggactgctcggaactcatggccacatgatctttcagatgtttaatctcaaacacagcacaatatcagggccaaagctgttacttaagggaaaattgtcacttactggaagtctaattgccttgatccaaaatcctatgggtgcactatagttttcatattggaacttaccaaactctctatatgacctccgtaactgctacaaacattttgaagactattggatccatcaaataatataggtcaggtgaatccagcctatattacctggagccactgaagatacatcctcatgggtgctgggtgccacccagaactggcatctatgttcacaggagagattgttctcttttctttctctccataatgtctttgtcttcttttgtatcaaaacaattttttcatcatattttcttattcatattaaaattgaaactatattttactcattgaagagtaaacaatttcaatctatgaaaaaatcttacacatttatttaaattatatatctgttataaaaaatataaagtcaacaatttattaggttcactaatgtttaatttacaatacaattttgctttaatgctctattttcctaaatataatgaactaaagtaatgatgatagaaaattaagtagacctgcttaaaatttataaaaagttaaaaaataggaagaattcaagagtaaagaaagccatctggactggacctgaaattttctttttggaagatttttaaaatcacacattcaccttctttaaacagatgtatgatactgagatttttttctattttttatcaattttcataaattgtggttttcttggatttatccatgtcatctctattttcaaatttattagcataaagttgctcataatatcctcttatctttttacagctttattgaggtataattgatatacacaaaaactgcatatacttaatgtatacaatttgatgagtttggacacatatacgcacccataccaccatcaccacaatcaaggtaataaatatacccatcaacccctgaagttccttgtgtctctgtgctttagtgtgtgtgtgtgtgtgtgtgtgtgtgtgtgtgtgatcatgtatcatgagatctactctcctcaatgtttaagtgaaaacactgtattattaaccacaggcacaatgttgtacagcagatctctagaatttattcatcttgtataatggtgactttatacccactgagcaacaactctccatctcccccttctctccttccctggcaaccaccattctattttcggcttctaaaagtttgactattttagatttctcatataaataaaattatgcaatatttgttattttttgactagcttattttactttgcataatgtcttccaggtctacccatgttgttaacaaatttccttcgtgtttaaggctgaataatattccattatatatacagtgccacattttctttatccatttatctgtcagtagacaattgggtagtttcccaacacaaatgccttggctgttgtacataatgctacaatgaacatgagaatgcagatatgtctttgagattctgactccaattattatggatgtatacccgggaatgggattgctggataacatgctagttccatttttaatttctttgtgaaggctccatactgttttccatagtgactgcatttcacatttctaccaacagtgtacaagagttctgatttctccatatccttgccaacacgtgttatctttaatttaaataagagccattctaacattgattaagatgttacctgggggattgtcataagtggcctttattatgttgaaatacattcctgctaaacctagttggttgagtgtctttatcatgaaggatgtggaattttatcaaatgctttctctgtatctattgagatgatcatgtgatttttatctttcattctgttaatctggtgtgtcacatgtattgatttgcgtatgttaaaatatccctgcatctcagggataaaccacacttgatcacggcatgtgatcttttcactgtgttgttgcatttaatttgctaatattttgttgggaatttttgtatctttactcatcggaaatagtgacctgtagttttcttttcttgtagtgtctttgtctggccttggtatctgggtaataccaacctcataaaatgaagttggaagtatttgctcctcttcaatttttcggaagagtttgagaaaaaatggcattaattcctctttaagtgcttgatagaattcaccaatgacatcatctagtcctgggcttttctttcttgggaagtttttgattgctgattcaatctccttactcattattggtctgtttagattttctgtttctccatgattcagtcttggtaggttgtatgtttataggaatttctccatttctactacgttatgcaatttcttgatgtataattgttcatagtagtctcttatgatcctttttattcatgtggtgtcaactgtagtgtttccattttcattcctaattttatttatctgagtcttctttccttttttgttagttaagtcagtcaagggttttgccaattctatttatcatttcagaaaactaattcttagttttgttgatttttttctattgtttttctagttcccattttatttatttctgctctaatctttactaactttcactaactttgggtttagtttgttcgtctttctcgaattccctgaggtgtaaagttaggttgtttatttgagacctttcttcttttttaaggcaggcatttttcactatgaacttccctctcattactgtttttgctgtactccatagttttagtatgtattgttttcattttgtttctctcaaggtatgtcttgatttctcctctgactcatcgaatgttcaggagtgcattgttaaatttccacatttttgtgaattttctaatttaccttctgttgttaatttctgatttcataccattgtggtcagagaagatatttgatatgatttaaatcttaaatatgtgaagacttattttgtggtctcatatgtgatctatcccaaagaatgttccgtatgtgcttgagaagaatgtgtattcctctgcagtttggtagaatgtactacatcaagggagtccaatcttttggcttcgctgtgccacattgaaagaataattgtcttgggccacacataaaatacactaacaataacaatagctgttgagctaagaaaaaaattgtgacagatctcataatgttttaagaaagtttatgaatttgtgttgggctgcattcaaagccatcctgggctgcatgtggcctgtgggccacgggttggacaagcttgctctacatatatccattaggtccatttggtgtatagtgtggttcaagtctgatgtttcctcattgattttctgtctggatgttctatccattgttgatttgatgtgttgtaaaatgtccattagatttgttttaatcatgtgtgataaaatacatgggcacagaaatgactatcatgaaggaagatttttgtattaatatctacagttccatagaagcagaaggcacagcatgccacagagaaatacatggggaagcagcagggtcagtcaggagcagagggagtgagggggaaacatgggcaagagtattgtgttggttgtgtgtgtgtgtgtgtatgtgtttgtgtgtgtgtatgtgtgtgtgcatgtgtgtgtatgtggaaagagatgccaaggcagggtaagtgtgctaagtaggtttatgattggctaattggaataatttcagcaggctctagggagaagggccgcccctggttgtcagaaacctggacctggggtgattggagcagggaaataatggcaaggcatgtgagagctcaacaaagggggttgttgaactggtttatttgcatatgaaaggaacccttgcaggtaagttcttcactatgtctaggaattgggtagccctaagaggaaaagtctattcaggatcagccctaagagagggaagtctctgagatgggaaggctctctaagatcagcaaggccccagatgccaaaatgttagaaaataaaaaggcatgattaatacatatctgatagatttgtagcagcatcaaatttttttaactcctaatattggtatttgtgccgtctctctttttttcttgcttattattgctattgcttagcgtttatcaattttattgctcttttaaaagaacaaacatttgtctgtgtactaatacattcccaactttttatggcataaattaatggctacttgaattccatctggtggagtatgaactctagcacagtgagtaataatgagtcacttttattggataccactgaatgcaggactttactgtgatcactgtgtgggcagtgataacaactcagaaataacatgcagagataacaacctcatcctccgctcttctcatagacacacagaacctttagaaattcatcactgtggcaatgtcttcacagagtggtccttggagaaccagcataagaatcacctgaggaccttgttaaaaactcaaattctacatccccacctcagacctaccaaatcaaacatacagctagtaatatgcatttttggaaaaataccttagtgaatcttttgtaagataaaagttttagaatcataaaaatttcagaataagaaatctaatggaaaaggcacagacctcacaatttgagtttgccttatttaaatgagaaagatatgacatggccatataggaaaatgcacataagtgtttgcagaaatcccattgctaggaactacatcatggttctgaatctattgccaatcctctgaccttggccaccttgctggcctccacatccctggggtgcttggtacaaatcttatttgtcaagttcaaatggctgaagctttaaaaactgcaatcagaaagctgaggctgctggatctgcttcaagttccccaatcaagagtctcaattttaatcctggaagcaattgattataaagaagcctaacgagatctgagttttagtggcctccattaattacctaaatggagggtgagacttcacttggacaaggactggcaccaaatcctgcttcagccttttagagctggctcataaatcagaggataagaccaaaaagaattttaaaattggacagaatcatgatcccatccaagagccatttttatataatcctatccctgcttggtaattactaggctatgacaattaattacttgctttggattaaaacccattcagtgctagatggatcatattttagtctggtaagataaattgtactacattttacctgtgcagaggtatcagtagatggagaatgataagctgaacaaaaatggtttattaaaaatagtccagggacaattagtacctaaacagcctgcagattcttttttaaaaggggtttttactgactcatagagagctggagtttctaaagtctttacaaaagaacagcttcattcagcttctatattgagaacatagaaatagtagttagtgcaggcaagtccagttttcagaaaacttgaaatgtagaaactcagatttgcaaactttgtaaataaggggatactcattacaaagctgggctggcttcctacccagctcctgttccctgtagatatattcactaagccattttcctgctgaatcttgaaataatgcatgtggggggatttcaagagccctcttatgtctccaaaccatatcctataaccacccttatgcctcaatctagtaataatagcaacaacatttattaagcccttagtagttaccaaataatattttcaataattttaggctttatttcattacatcctcacaataactctatgaagtaggcactattatcatctgcatttcacctaggagaaactgaggctcaaaatagctagttaaccttcccaggatcactgtatcagttctattgctgtgtagcaaactaccccaaacctactagattaaaagaataaacatgtatttggctcataattctgtggatcagcaattttggctgggctcagctgggtggttctagacttgcatgaggtctctgtggcatgtgtagtcagatgcacatcagatgtgctcatcttgactgggttcttacacaagtccggagccttaggtggaacagctgagctgacttgtctctgcccctgtaggctagtgcaagcatgctcacatggcagctaaacaggattccaagagaggaagctgaggtatgcaagtcctcttgggctgtaggttagaactggcaccgcatcacaattctgcccctttcttttgcccacagcatgtcacaggctagcccagattcaaaagatagaaaaatagattcctcctcttgatagaaagaactgcaaaattacattgcaaagaatgagaatatagggaggtgtggagaattgaggctatttgggttttttttttttttttttttttttggccatccatctacctggttatataatcggtcaattgtagagccaacattcaggggatcccttgactgcacagccagcaccccgaccactttgccatactgccttcataacaatggtttatcttctttctgtaactgggccttggttttactatttgaataaaccctctactttagttaacctgctgctattccaatttttccaggtctttagatctgcctgcttttgacctttgccccaatgccattctgcattagagcgctgctggactctgctaaaagacctacccaaagatgacggtcttcctgccaagggctatgccctgtgattggcccagacaacctactttgccatgtgtcaccaaattccttgcatatactgctctgtcacctcccagcacctccacaatttggcctagcacttcaatgcacttgttcacttatccatggattcgaccctgtctaccactgagcagctcctatagtctttcacttcgaaaagtgatccattgtaacaatcttctaaatgactagtgccaccccctgtttaaaacaggattgtatttcctaaaactcaatatgcaaagtttctgaaacatagctactgcattgagtaagacccactgttaactgtgaattcaactcgaaatttttctctcctctttggagtcaggcattgtagccagccatagctccctatccctgaccttaccctagttgctccttttataccttttataccacaccaggactgcctctacattcttccctgaaccctgctgtggctaagaatcacgcggctgtaaccactggacaagggatctcattatcctcaagatagtgtattaaaaccagatatttatctgtagttggtgtatttgcttttttgcagacactgttagttttggaaactttaaaaagtaaattgttagacacattgagacagagcagagccatggtaggtcaaccacttcactgagtatgtcacctttgacaaattgtttctctgttcagcacttcagttttctcatctacacacggaaattattagattagatgattgctcaagtctcaccaagttttaacattttctttctttttccctcccttcctccctttctctccctctccctctctttctttctctctctctctttctccccttctttctttctttctctctctctttttctttctttctttctttctttctctctctccctctctttctttctctctctccctctctttctctctttctctctttctctctttctctctttctctctctctctctctctttctttctttctttctttctttctttctttctttctttctttctttctttctttctttcacttctttctttctttctgtcacccaggcaactccagtgcacaccactggagtatagccatatgaactcactgcaacctctgcctcccaggttcaagccttcctcccacctcagcctacccagtaacagggactataggcatgaaccaccacacccagctaatttttgtttgtttgtttggtagagacagggtttcaccctgctgcccaggctggtcttgaactcctgggctcaagtgatccacctgcttcagcttcccaaagtgctgggattgcaggagtgagccacgatgcccagcagttttaacattttctgatttgaaatatttgttcagcacctactatatacatggaaggatcagagtcagcagcagaggagctacttgagtacaacacaggacatcaggtcaccctagcaggaatgttcataaagccattagcctgcagcatgtctgaggccatactatgcacccttgctcatatcctgattaatcatccacatcctgtgataatgccccacaacatctgcagtattgcaggtaatatttctgaattcttcccattgcagattccagttgcaaataacagaatcctctctgtctcagcatttttaagccagggtatgtctaccactcttcccaagacatgaatagttttaagggaatcaattggtataatctcattttccatatgtactttcataaaactgttctacttggagttggggtgttttgttggttttctatttctaccttctcattgaaaactgttaattacttttcaaaagaaaatcataacattttattaattttatttgagcataaaaatacataacattaattaattaattaaatgttatacaccaatcctatggtgcattgatctaggatttagaaatttccagggtatcaatcaaagtacagtttccaatatttgtgtcaaggaatctccttgatccaaggaatatcaaggctggtacttcttatattgcatgtacatctattaaggaatgactatggcattagaaacaggcttttggcctgtgttgaggtgccctcttacatcgtagactggggagaaatgttataatgacctcaccacctgtaactcttcactcttggtaaagaatgtatcaatacttatggaaagtgcatatattatagactagggagaagtgttataatgatctcaccacgtgtatttcctgactcttggtaaaggatgtatcaatttttatggaaagcaacctaaggacaaaacaaaaagcctatacataagagctggggaagctggaggcatctgatttcacccaggtggcaagctctcagcgaggatgcatgctttatcctatctgcccttctatcttggacatagaattcagaagttaaatggctgtcgtaggaatgcataataacatgcttatttgaattgaaaaatggagtcagagtatttctgacagaaattaggtctgacttggctcattaatttgaccgtgaacactggctttgtcaattaggatatatggcaggcatttttcataaattgaatgagcttaatctgcagctctaagattttgaataaaaacattatgtaaattacatcataaaagtattttaccacaaaaaatgcattggtaaaagtgtattgaaattaagaatattttttattcctccaaacctttctgaattatgaggttaaatacagtttctttaagtgaaagagaaacagctataattaatagtcatttgtaagtctggaaatgattgcccagcaattgagaaagtggatgaatctgatgactcggcaacaattttcttttttacccccctttacagattaggagattcttacttttttgtttaaaaaactgaaggaaaaccagtagaatttttcaatagtcattaaaataattttaagagccattttattttaggaaggcattcagagaattgaatgacactgctatgacaaaattcctttcattcccatctacttatttatgtaaataaagttttttagtggttacatatataaaaattaaaaatgaaatagaattgatgatgaaactctctcattctagtagcagtaacattcattcatgtgaacataacctaaatggaaaaaactagcttcattcatctcattgagagaaatgtttccaatagcatcaatttttatgtttaataattacttatttaatgtgtaatgtatttatactcttttgattaattatatatactaataattgtaataataacaatatataggtaaattctagaacttgaggatttttatgatcacagaaaatatcaaacaattaaaatttcattttataaactttttttggcaatgaaatatattagggctaacaatacaaatatttgagcataaaatacatacttatgaggacataatttatggtagatatgaaatggaaatataaactcaaggaggaaatataaacattataccatttctaactgttaaggaggactttgtgtacttttaaaagtgaacaattaaggataataaatcaccatggtagctagattccattggatacatttaaaagaatgatggggctattatattttgaaatctcaatgcaacatttacaatatgctagaaattacatcctttttattttatttattctattaaaatttataataaaaaatgtagttgtccacttaaagatatgcaactgggtccatgttctcttcaaatccaaccaggtcagattgccaaatccagattctcattgccttggaaatctgttgtctgcagccatttctggtgcccaaaccagaactgatccgggtttgggtgcatgcaagagatccacattaggtagtgtcaccagcaagggacttgaagcaggggatttggtgctcccaaaattgtttgaaaggtcaagagaaaatactctagactgagcatccagttgtttctgcagagccactttatcctgttgcagcaactgatagatcagaaaactcctaacactgtcacttattgaatgagcatctaacctgacatgaccaggaaagctatactactgctctaaaattatgccacttctaccacaatccccaccagcaaaagagactccccacacccttccttttctttccatgtctctgggttgcacaaattcacctaattggtggagcctaaacatagctggaactctaactctaaggtggtgcagaaattattgtttctagcttttcagcatttatgtaatgggaagggttgtaatggaggcaagtgaaccaccatactatcttccataagtaaggactttcttatgcatagaagaaaaggggactcctgatatgttattcaggggattccagatgggatcagggaattcccaaatctgtctgctgcttgtcacactgcctgtcagcccataatggagcactattattgatgctttccataagccccttattaacatgtaaacattcctataagattgaacagataaaggtctaatccattattaacacctacacaaatgtcagttaccagttgattgagagagaggtatgtggtggggagtggggaagaaccctagaagatggtaggatgtctaagtaggaggcaaaagactatcaaaggcaaattgctcacctacacaaatgagctcctggacatttctgacttcttttcgaacagaaaggccagttgtgctgtgacaaggatgtacataacagagaggcaagatagcaagcacaacgaaagtttctcctgtctcccagcaagccctggctctccagctctctcccagcaaacaaatgcaaggcagaattcagaatacaaatgtcttctgatgtatccttctccaagggcaggaggactgtagagattcacatatcgattgggagcataataatgcaataaaaaattcaaagacaagccaatttctcagtgtttgcaaggactggcaagtccagcaaggttattgatgaagaaattaagcagaatgcaacgcagcctgctccagcctcaactctctcataaaaaaatctacaccagaagcatttctcacatgacgtcagcatgctccagtaaaggtgtacactcctggtggtttttgctagacggatactgattgcattccaagggatgctgtggtgacaaggaacacgaagtctaggttctggtctaaaatctgacactacattgctgtgttacctaaaacaagtcacttgacaactctgggtttccgtttcttcattggtaaggcagaaataataatattaatcttgcttgcctcctaaagaaaatggccttaactcgaggtccaaggataagtttcaggcattgttggagccccctgaaattatagacaaacttttacatttagatggatatactgaagataatttcccacataattctaaactggataatcatatgcaggaggaaaaggggtccatggctcttttaaaaaagttaacaactaatggccaagagaatcaatggaaataagttaatcggtgagaactgctccacaaactcttgaagaaaataagaatatttcattcaagtttacaaataatagccaagacccacttgccttattagtacagtatgtaccatctcccttctgggtttttctgtcctatttgtgtcccaaatttgcagtttttacttgctaagatttttcagttcatatatacaaccacctctcagatcaccaaatgattttaagaatccagactgggttatcccactttatgggcccctcacagttccaaggatccacaccactggtcaggcaagtttccttttagaccttaaagtccattttcactcccttttcttggttattctaactaatcacctgcaactctaagggaggctactcttatgacactagagaactctaaactggtctttggaggaagcttacgcttgatgtaatttctctttgctgttagatctgacataattacataattgaagctgcctctcccttctaaaccagaccaattatgatttctttatttgcaataagatgcaatttagggcatcaagaaagggaattatccaagaatctcatcttccctttaccctcagttagacgcagagttcatgcagtctctggatgctgctcatgattctttcggccctgtctaggcgtggatggattcactcggtcaccgaggtcgcctttctactctggtgattataaacaggaaatgatagcagaattactcataagctttagccaaagctttgttgggcttaggctgctgttccagcaaattcaatgtatgtcttgaccctttggtaagactatttctgggataaaactttttggctcatggcaaaatttgctcaacatttactccttgaccaagtcaatgtacgcctctatccaggataattgccattaaaatagacatttcatttatttggaacacagagacaagtctctacctaaatgaattttggatatatacctctcaacaagagacctagaaaggttcttaagcaaagactatattattaagtatattgaaatttatacagcagtgtaaacatactgatatcagtgagcttggttagcttctaaagagccaaagccacaattagccaataacagcagagaaaataaatatatgtcaacttccaggaagtttagtactcatgtgaagattctttctatgacccctcttttaatcccctttctggtttgtagcctgctttagtgattttaaggtgagttcatgtcacacctcttatcagttattttacgtatatatacaacacacacatactatatatacatgtaaaatagataaaaactttatgtgtgtgtatgtttgtgtgtgatccttggaaataaactttttatctttttaggtacccatagaatatttataaaataactctatattagaacagttgattcaaataagacacaattagagctgtaatcaaataccattctctgatactaatgcaatacatctagaaatgtacaataaaataaaaaatttaatttttttcatttaaataattctgaactaaaaaagaaaatttcagaactgacaattgtgtagaatatgaagatatatgataacatatgagacatagctaaagcagtgttcagaggaaacttttagccttcaatatattaataattgagatcaaatgaaaataaataaaggtcccagtcacaagtattgaaaaatatcaaaataaacctaaacattacatattgaaagaaaaatttaatataaaacagaaacataaatttaaaatagaaaaacaaaaaataataaaattaataaattactttattaactaattgtttgaaaaaatgcgaaattaaataaactgtcagctatcttagtccaaaaaagtgggggtaggcacaaatatggaaacaaatcacagtatgaaacggtcactgtaaagaggcagcccaatgcactatatttccaagcagtaccatctttgtatctaggggtaaccacatgactaattctagccaatggcacatgagcagaagcgatatgtgtgtgtaaaaggatttgcaccagcaattcacaaaaaagaagtgcaaatggttttaaaacaattgaaacaacgcctaatctcacttaatataaatgttaatttaaactactacaacaaaatgtactacttttcaccacccacattgtcagatatcaaaacatttgacaattgtaagaataattactagtaattatagaacatgtactatgtgcccggcactgatgcaaatacttaacacatctttagtgctcacagtaactccatgaggtgaatctcattattacccccttttacagatgaaggaactaaagtacagataatttagtaacttgcctatgggctcatatgatattggcaagtgtgtggaaaatggtcattttcatgcactgcagtggaaatgcacattgcaaaaggcaacttggctatatctactgaaattacaaatgtgtatattttcgacccagcaattctgttatgaggaccataccttacagatctacttactgattgggcaatgttcagtgtacaagacattaactgcaatgttgtttttagaagaaaagccttcaaataagaacattgagaagagttgggatggctactcagggctgcagctggtataaagctgtctctgttctatggctggaggacacagaggagagcacacagcaacacctgcactgcagtatctcctgctaatatcatacttcataatgagaaaccacatactttctccttaagatggaaaacaaagaaaggatgtcttctctcatcagtcctattcagcatgtactaaaagtcctactttgtgcaaaaaaaaaaaaaaaaagtaacaaaatgtatacagattgggaaagaagaaataaaatggtctttgaaaaaaacacctataatcaggagctttttgttgattcccaaaaaaccaacaaaaaaaattattgattacagcaaagtcacagcatacaaagttaatatataaaaatcaattaccttcctgtacaccagcaatgaaccaattgaaatttaatattaaaaatgcaatatcacaataccaccctaaaaatgaaatacttaggtaaatatgtgtataatctatttgcagaaaactataaaactctgatgaaagaaatacaagatctaactaaatggagagatattccatgttcatggattggaagattcaatatagttaagatgtcaattcttgataacacctgacttgatctatagatccaatacagtcccaatcaaaattccagcaacttatttggtatatattgtcagactaattctacagtttatagagaaagacaaaagacccagaatagacaccatgatactaaagaagaacaaagttggaagactgacactaccagaattcaaaacttactataaatccacagtaatcaagacagcgtggtattggttaaagaacagacccatagatcaatggaacaaaatagagacccctaaaatagattcacacaaatttagtcaactaatctttgaaaaaggagcaaaggcaattcaatggaaaaaggataattttttcaacaaattgttttgcaacaattgaacttctaaatggaaaaaacaaaaaaagtctaagcactgattataccttttacaacaattaacccaaaatgaatgatagaactaaatatgaaatgtaatactttaaaacatctagaagaaaacataggacaaaaatctatgtggccttgagtttgctaatgagtttttagactcactaaaagcataattcattgaaagaaagagtttaaattagactttattaaaattaaaggcttttactctaaaaacgacactgtgaagagatcaaagataagccatagactggaaggacttatttttaagccatatacctaatatgggatttgtatccaaaatacattaaaaactcttaaaattcaacagtaagaaaacaatcccatatttaaaatgggcaaaagatctgaacagacatctcaccaaaaaagatggcaaataaacatatgaaaaggtgtttaatattatttgtcattagagaattgcaaagtaaaccaacatgaaatgacactgcgtgcctattagagtggctaaaatagaaaatattgacaatattaagtgctagtaaggttgtagagcaacatgaactctcattcattgttggtggaaatacaaaatagtaccacccctttagaagagagttttgcaggtttttctgtagagctaaacatagtcttattatacaatacaacagtcacaatcctaggcattcatccaactgatttgaaaacttatgtccacataaaagcctgtatgtgaatgtttacagcagctttactcataatcactgaaaactgaaagcaacccaaatgtccttcaataggtaaatagataaactgtggtacatcaatacaatagcaataaacaggaataaacaagccaagcaaaacatgtatggattaaaagcacattgttaagcttataaagccaattttaaaagcctacataatatatgattccatttatatgacattctggaaaaggcaaaactatagagatggtaaacaggtctgtggttaccagggttcagatgagaggaaggatttgaataggtggagctcagggaattattttgggagtgactattatgtatgatgctgtaatgacagataaatagaacttgatacaaagagtgaacattaatatacacaaattaaaagaaaattacttaagaggttgggagatcccatgatgaaatgcagactatgaggaaaaaaagtctaattgtattacaaatgtgtgaaatacccttattgaagggtgcgtttgggcagggggagatgctgacctaagtaaccttggaaatgagtggagactgtaagactaaaggcaaaagggattctatataagcatggtactgtagtcgataaagttgtttcccaaggggttatgggttcacaattctgatactggttgacatgtatactggtactgaaccattaagtaattagagggtggatattgggagtcagatttcttcctgttagtgtaggagattgctgacatataaaggaggaagaatagaatgattcatgtggtgttaaagttggcaaaatgagcaaaaagccacattaagtcaaagggacacaggagccaactgaagggctcccaatggctggaatatttttagcttcttttttaaaattaaactctttgttttgagaaaacggtaggttcagatgcagttctaagaaataaggcagagtgatcccatgggtcctttgtctgtttcccccagtgtaacatcttacaaaactatagtacaacagtacaatcagcatattgacattgacacagtcaagatacggaacatttttatcacaagtgtctttcatgttgcccttttatagccacgtctatttccctcctactcccattctctccttaattcccagctacctactaatttgttctccacttctataattttgtcatttcaagaatgctgtataaatggagtaatatagtatgtaaacttctgaggttggctttttatcgctcagcataactgtctggatattaatccaggttgctggatgtatcagttgccatccctttttatcactgagtagtattacatggtatggatgcactacagcttgtttaatcctcatcattgaaggacatctgagttgttttcagtttggagttgctataaccatttatgtacaggttttcatgtaaaccaaagtcttcatttctccgggataaatgcccagaattgaaattgctgggttatatgacagctgcatgtttagtttttaaataaattgtcaagttatttcccacagcagctgtattattttatattcccaccagcaaaatatgagtcatccagttctctgcatcctcaagctagaacaatttgagcaacaaattcaccccaaactgtaaccagagagtccaagagctgattgtggtagtcgatactggtgggcctcccagagcaaagagcaaggtggaaaaggatagtaggtatccaagtagcacacaaaaaatatccagcacagagaagttgtgtcaatcacctgaaatgttcatcacaatccactgcatccctggacatcagacatggcttttaacttcaagaagtttacagtttcaggttagggataagatatatgcgtgaatataaccatcatcaaggcaggaggtaatcagagtcacaagagaaccccatgaatcaaaaagtggcagattagaggagacatcatgatgaacatatcagatgaatcaaaccttgaagaatcactagactctgccttgcctatcaggaagggaacacattcacatacttatggttagcttacaagaataattccctaaatctgctttgcatgtatggtttataaatattttcacactcatatcttatttgatcaccattttatgtagatagtgtgtatcagtcagatattgatatataacaaaccacctgaatgcaattcttatgctaacgacccagagttacatcaaatttcacagataaagagcatagtcttccaaaagactacttcacttcagacaccatcagcaaactccagggttcccagaccattcacacttctgatcaactggctacaaattcagggattccccctaccctctcaagtgcaagaatttgctagaataactcataaaactcaggaaaacactatacttataactataattttattataaacaatacaattttgggaccagccaaaggaagagactgatagggtaaggtctggaagggttccaaccatgtaacttctgtgtcctcaagatgttactctcctgtcacattgatgtgtatcaccagccagggaagctcaccagacctttggtgtccagagttttcctcggaatttcattacataggcataattgattgactcattggccacatgattaaacttgatttccagaccctctcttttatcagaagatcaggcagatatcaccaaagctccaaccctttgattacatgcttggtctttctggtatgaccagaccccatcctgagtcatctcattagcataaatttacctgggatccaagggacccaccatgaataacaaagacactcctatcactcaggaaattccaaaaatttagagattctctcccagaaatgggaaataaactagctaaattttcagttataaaacgtcacttcaatactcagtagtttaaaacaggagttatttattctcacacacctatagcttagctgatctaggataagcatgactgggcccagcttcaagctatggtagggtccaggtcaactctatatgtctcttacctttgaaccaggagatgagataggacctattcatagaagaatcaaaagaggacaagcccaaagcttcaagcacagtacaagcctctgcttgcatcatgttcactaacatcccactggcccataaagttatctagcttaactcaacatcaaaggaggtggggaagtatgttccacttataattggaggtgcaaaggggcaaatatttcctgaaaaataatctgaactatcatataagagaaatattatgtactcttttagcccctttgtggcagaagctgtgtgctaaagatgatttctaaatatccaggaccaccatactatgcccctaaccactggctgtttatatcttaagtgtcctccatagactagtatcccttgggcttgaggctttgatgaaaccaaaatgggtcatatattagtctgttaccaagtcttcacaaataaatgtttaccaaagtaattaaactctcagcttatcagcaaataaaaaacagccatcattggaaaaaagagcccactgatcttcaacttgtggtctctctttgactttctcccttccttttttcactctccttttcacagtttgcccttaaaatccttctgctctcttgatctccagacatgaatcatgctatgtaatatgaatgataatgagtgatggtaataattgaaaagatgaaaaatctgcatttgtttcttatctagaaagataccaaaacagctgccagggagtgttcagagactctacagcccattccataatttatgaatgtgagaatgctccccatgaacagcctggatgagtcagatgttttaattgggctgccttaaatttagaaccaaaggagcttgattcctactccactgggtagtctcatgaagggtgttccagccagagaggagccagagttgacacttacatacacaagtgggtagaataaagtacaaatgttgttaatgtttgtaagacactacattctggttttgttctttgattttaaggttgaagaattttcagagaagccttattagggaagacttctcttttatatgaaagttacctcattgtgtcctctcctaggcaacaataacttgagtgtgaaaatcagctgggatcccacattgctaagcatttctgaaaagggatctttaatgtggcactccgtaaaagagttaaaagatttgttgaaaaatgaccacatccatgctctgtgaaaaagaaatataggcaatttatgaattttatattcatgacataatgtataacaggtttattcacattgattcattaagtaagtgtggagtgaggcatgtgtctggtactgtccttggtgctgatgccagcgacacgagcaagaagagtttgtgtctcacggaactacagcctagtggaggagacagacattactcaagtgtaactggatattaaaattgaagtttcaaataaggtatcataatacattccaaaatgagttgtcagatcaacatttgagttttaaaagtttctgacaagccccttccctaaaggagaccaaaaaatgggcattgaatagttggagaaaaggagaggatttgaaaggaggatttcttacaagcgagcattgtcataagcttccccacaataaggaaggatgaaggtgcttttctcttcatccaagccccaaaaatgagacctttaatgtgaccacttggagatctgatgtgtattcctgcaattatagggaacagtaatgtatttcacaggtctgaggactctaaaggtagcctaagctagaagagggagggaaaagagagaattgtgctatttttgaaactaattgctctccctttcaaaaatatgtcaaatgtacaagaattcaaggcatacaaatttcatgtgtatcaattatctattgcacaaaaatgctgcataaaaaacagccacaaaacttctgtggtgtagaacataaaggatttattttgatcaaaagtttattggccacctaggatgttcttcttgtctttgctgggattggctgatcttggctgatcttggctgggtttgctcccgcatctacagtcagctggcgggtttgctgtaggctggatagtccagaatggccccagttaaacaactcatctttcttccgtatggtcttattctttagcaggttagcatgggcttctttatgggagtcagatccagtttccaagagaaactgtgaagaaattgcaagcaccatgaacagactattggtggaaatcttgactttaagaatgttgatggtgagtgctgaatagaaagtgagaaacatgttactgaaaatgggagaaagggagatccctgttatgtactggcaaatgcttatcaaaattgtattctgtagtcatgtagaaaacataacatgtaagtgataaatttggacgtgtagctaaggaaattcccaagcaaagtgttgaaggtgttacctggcttctttgtattccttatagcaaaatacaagatcagatagataaattgagggaagaactattaaacaaaaaggaattggaaagactttggaaattctcagcctctccagatgtcaaaagatgctaaaagtccaaaatggttgctgaaagtgtgaagtagagaaaagtctgagtttgtgactgtatgaccctttgctgaaacctcagatctcatctaaatatttctagttgagaaggacaatatcaaaaggtcaaagtactcgactacacagtaactttccaagcgataaagagtgttcttcacagatattctcaatcaaaccaaagggcctcaagaagtttaaaatcattgtccttcatccatctcagcagaagccaaaattacattatcttgaaaatatttgtgatgtggctcaagcataatggaataaacccttaagacatccacaagagattcacaaagttcttgagaacattatatcagcagaaacactaccaacttgattgaagtggacagagacaatgcaacacaaaggaaggctttcaaacctccaaatttccactggttcaaagcaggctgataaaactactatgcttcaaccacttgctatcttttatgaaaaatgaatcacttatagggcagaaccaagaaccagaatgcagagccaagggcccacagagcaaagccaagagccatggaggattattcccagggcttgaaacctaaacaaggaattttggctaaggttttcctggctaaatttcaaagctgctttgtaccagtgacttcatttttgccttccattccccatctaccaacccttttgaaccagaatgtccataactattaatctacgcatggtcttgccatcatatgttgagacagttgggagcagatgacttgtccctttagtttcacaggtccacagatggaggagaattgtaacccatgaatttgcatactccatgaaatttcataaatcatcatcatttgatttaaattttgagaatttagactttgaccaaatgagatttatttttttattgtggcaagaatccttaacatgagatccaccctcttaaatgtttaagtacacaactcaatattgctaatgatagacatgatgttgtacagcagatttctaaaatgtattcatccaaagaagacatacaaatggccaagaggtatataaaaaatgctcagtatcactaatcatcagaaatgtgcaaatcaaaaccacaatgagatatcatctctcacttgttgggatggttgttataaaaacaacaacagaccaggcgctgtggctcatgcctgtaatcccagcactttgggaggctgaggtgggtggatcacctgaggtcaggagttcaagaccagcctggccaacatggtgaaaccccatctctactaaaaataaaaaaattagccaggtgcggtggcatgcacctgtaatcccagctactcaggaggctgagacaggaggatcacttgaacctgagaggtggaggtcacagtgagccaagatggggccactgcactccagcctgggtgacagagtgagtctccatctccttatagagagagaaaaaaaaacgacaaaatgtggagaagttgtaaccattatacactgttggtgggaatgtaaaatggtgcagctgcagccactgtggaaaacaataggtaggttcctcaaaaaattaaaaatataaatactatgttatctagcaatcccactccttctgggtatttattcaaaataatgtatatcaatatcttcttcaagagatatctacacttacacgtttattgcagcattattaatattgtagccaagatgtggaaagaatctaagtgtctatcaatggataaagaaaatgtagtacacaaatatacatggcatattattcagcctttaaaaaataacaaaattcagccatttgcgacaacatgggtgaatctggaagacattacactaagtgaaataagccagccataggacaaatactgaatgattccacttacatgaagtgtctgaaatagtcaaactcacagaaagagagtagaatagtggtcatctggggccagagaggagaggaatatagaaagttgctgagctaatttggatgtaatttttaatttgagttgatgctgcagtggattgagactcctgaagaccttgggaaagagtaagtgaatttagcacatggaagagatgtgaatttgggggaccagaggtggactgtggtagatagaatcctgaaataaccccctaagatatttcatcctattatccttggtattgtgactatgatgagatagcatacccataattatgtaataatacatagccaaagggattttttgatgtaattcggttactgattagttgactttgagtaataacaaaagagattatatgggtgagcctaatataatcatatgaacactaaaagcagagagttttcttcagctggtagcaaaagaggaagtcagtttcaaagcatgagaacttgacacacaactgctgatgtgaagatggaggtcacatgacaaggaatacagcggtctctggaagcagagaacagctcctggctgataaccattaaggaaacaaggacctcagtcctacaactgcaaggaattaaatttgtctaaaaaaacaaataagcttggaataagcttcttccccagataacagcccagcctggctgacaccttaactctagctttgtgagtcccaaagcagatgaacaagccaagcccacacttctgacctaaagaagtgtgagataataaatggctcctgttttaagccactatgtgtgtggcaatttgttacacagcaataagaaaccaggacagcctctgaaggcctaggctcagaactgacacactgtcatttctggagtattttactggtcaaacaagtcagaaggccaggccagattcaaaaggtgggaagatagaactcaccccaggaacattgcaaagggcttagattcatgtaggtaaaaacagctggggacagcctgccacacaaaataggaatgttgacttggggttattttgaaaggaaacctgcttaataagagagtttctgccagagagtaaggagaccctaccagtggggtgaaaagctgggaaaccagaagccaagggagtggtgggagaaaacagttaaaggagggtcatgagatgggtccacctgctgcaaatatccaccaggcccagagaggccaaagccatttgacagtagtgccagtaccagtagaactttttggtcttcccccgctacatggtcatatccaaaagggtgggctaatccctggacaggcccactgagcttaggctctcctaggtctttaattcatttgcttgtttatggattggtcatttttatataagagcaattgaactgggcttgtttgatttttgccaatattgtgtaacccagatggcaccagtgacatagtaaaacattgtgcccagaacttggaaattacagctaggtggtttaggttgctagatgcagtttttcaaccatatcagataaagtggaagttctgctggagtttgagggtggcatgattgaagcatgaggggcttgctaaaccccacccccttgacttctgcttctcccacagtctggcagtactctgaactggaggagaagagcaccgtaccaacaaagtgcatttctcaagaattcacaagcccaaataaacacatcagggactatccttcagtctaatgtttcctgttgataacataggcctagagaaaactgttacttcgataatattcgtgtgtcagagctctgtatttgccaagtctttatcaccttcctctgtaggacaacatcaaaggatcagaaacagcttctacctactagagaaggtgagctgttccctgaaaatacgtcacaaatcatgcttattcagcccaacagttacatgtttgataggtatgaactcctctgcacactcaaggtagaagttttttatttcttaaactggttggaaccagctcccctaaactggtagagagactagtaccacattttggaggcttcactgacatcactcattaaagaacccttgagcttacacagtgcaaaatggcagaaccatcgaattccacttcaggctggaagagctctgtctggtgtctgttgaactgatgttatctttactgccattggtttgtgctgcctgtattaggctgctcttgcgttactataaagaaatacctgaggctgggtaatttataaagaaaagagatttaattggctcacagttctgcaggctgaacaagcattgtgccagcatctggttggcttctagggaagcctcagtgagcttttacttatggcagaaggtggagccggagaagtacctcacatggccagaggaggagcaagagagagagtggagggggtagggtatatatttttacacaaccagatctcacaagaactcactcactcactcaccaagccataagggatctgcttccatgacccatatacttactaccaggccccatcttcaacaatggggattacatcaacatgggatttgggaggtgggacatccaaactatgtcactgccacgtgctggtcctccaccacatattcagtgcactgctcagctatagaagcaactgcagccatcagtggtaagctcagcaacagatgcactttactgagacttccaggccactgctaccattttccatccctcacagacacccacagagcattctccagaactttgccatctcagaggtgatggctatgctagagtgcattaggcatctgcctttcaaagaatctacttccaagtcttgatttcagccccatgcacatacacttgtaggttgggctattttattttctaactctccaaattcaaaggttaattccccctctcagtcaactcaataagattcattgccctgataagccaagaacgggatcttaaacttgaaaataaaaatgtttgaacctccttttaaagaaaaaaaatttcccagacttccaggattcaattatggaatctacacaaaagacatgctataaactgtcagccattcggctgaaatgaaattattgctcccactacgattgtaatgaagactgccacaagatctttttaaatttagcataaccttgctttgcaatcaaattcttctaccactttgctccattgttgagcaaactgccaccacgcagtgcaccagaatactcaccagcttacccctgctgtgaaggatcacttataaattaaatccacctcattctttagttggcctgataccagcaggatcataaacacaatgaataaggacattgaaaaatcacaaggcaggactcagttatcttaaaaatccataaaatgtttgcattaatatatttagctactgtctaaatgaaaacctccaaatttttcatttccaaagaatcgtatatatcacagaaattatcatagttaaatctttagcagttacctccattctatgtttgataattttctctttttttgatggagtctcactctgtcacccaggctggagtgcaatggcgcaatctctgctcactgcaacctccgcctcccgggttcaagtgattctcctgcctcagccccctgagtagctgggattacagccacacactaccacacctgactaacttttgtattgatcattttctaataatatcaagaaagggaagtacaggatgtgctatgatgtgttcttactgtgcagcagccacccaacttcagtggtatataatgataagcagtcattttgctcacacatctgcaggttggctgggttttacctgatctaggttggactcaattgggtgtctctaagcagcaggttggatccagttctgctccatgtctattttatcctctttggaccagtggaccagccatggcatgttctcatgaaaatggcagaagcaaaaaggaacaagaagaggcatattaggcttcttaaatccttttgggaaccagcatcctgccacttccactggccaaaagcaagccgcatagtcaaatccaaagctaatgggctgggatgcacatttcaccttaaaggcaagagttgtgaagtcacatggtgtgttagtccatttggattactataaagtaatacctaagactgggtaatttataatggaaaatggtttatttggctcatagttctgtaggctgtacagaaagtgtaccacctgcatctgctcagcttctggtgagggcctcaggaagtttacaatcatggtggaaggcaaaaggagagcctgtgtatcatatggccagagggagcaagagagaggggagaagccagtctcctttaaacaagcagctcttgcatgaactcaccaagcaagaactcactcattaacatgaggaaggcatcaagccattcatgaaggatccatctccatgacccaaacacctcccaccaggccccacctccaacactgggaatgacatttcagtgtaagatgtggagggaacgaacatccaaaccacgtcacatggcaatgggtcaggatacagggaagggtgaagagctgagacggacaattccatctgccacctatgaccagggaacttcatctattctggggtggcaagaaagcctttcctgaggaaatgaaattttggctgaaaagtgggaggcgggcagggagcaagggttaccatgtaaagtagaaggaatagcattcttccatagggaatagcatctgccacagtcttgaggcaagaggaccatggcacattaaaaaagggtggcaaggatgatgagaaacaaggcacaggagaggaagcaggaaggcagtcaggagcccgagggggtggggccttacaggccatgccagtggcttttgacctttatgggcatagggaaatcattgagaagttttaaccagagaagtgaaattttgcatttgaaaactattttcagctttatacagcagaaacatcaactcagaatggcttagacaataagaaaatgtattacatgactaacacaaaattggagcccctccaagtcggtaattcagtaactctgaaacaacgcaagggacaaagcattccccagttgcatgtcatcatttacaatagatcagctctgtcctctccttaattcttttaagtcccaagatgaatacataggttccagacgtcacatgcagaaatgacagtgtccaggtgaagaaatgatcctcttctccctccttttcaggattaacaaaaaactttcccagaaacctccaggggaagtgacatctcattggtcaaaactaggttacaagcccacccttgaaccaatcccaagtaagaagaatgagactgccatgactgacttggaccaatcaagacctatcagctagagtcgttacgtaacaaagacaaaactgtgagggggaacggcttctttcagcaaaactgtgatgtccactaggaaagagggacttggcacatggccaagcccagaattaagggtagaaaaatacaccccaacttcagtgggaaggaatgcagagctacatagcaaagagtgaatacagggaggggtaaacatttggacccattaattcaatatgccaccatacttctaaacattcccatcgactggacacacatacacacacacccccacacacacggcaaaattatcccattctgtggcattgaacacatagcaaattgtgtatatttctcacatgaaacatgattgcataccaccttgtctttattattgcattagtctctactgctactataaaaagttatcacaaaccaagcgtcttaaaaaacatatatttattatccaacaattctgcatgtcagaagtctgacatgggtctcactaaggtaaaatcaacgcgccagcaggactgtgttcctttttggatcctctagagcaaaatccatttccttgcttattctgattgttcaaagccaggttgagctcctctcacattttgtatttttccttccttttttctggttctcacatctctccaatcttgtgtgccttcctcttctttttttttttttttgtttttgtttttgtttttgttttgttttgttttgagacggagcctgtagcccaggctggatgcagtggcgtaatcttggctcaccgcaacctctgcctctcgggttcaagcaattctgcctgcctcagcctcccaagtacaagtagctgggattacaggcgcatgccaccacacccggctaatttttttttttttttttttttttttttttttttttttttttttttttttttttttttagtagagacggggttttgtcatgttggccaggccagtcttgaactcctgacctcaggtgatctgcccacctcagcctcccaaagtgctgggattatagccacctcgcccggcccctcttcacttttaagaacccatataatgacatcaggctcacctcggttattgaaaataatctccctgtttcagagtctcttgccttaattccttttgttttgtaacccagcatttcacagctttcacggattaggatgtgcacatctttgggggccattattgtacttacttcaaatttattaagcaactattaaatgattattcagcttcgagtgtgtctctccgagtcttttgagagcactgtgagtttagagactgagtgtaaatgttcctgtgctctccacctaaccactcagtaacaatgtggaaaaaaatgaacctggtatacaggaaagctctaatatcatttaaaagggagagttttatctaagtggtctattcctaacacaagagataaatcctactgtttaacacgtgacatggttctgtcttttacctggataactgtaccagcaatagcccaaaaggtatctgtggtagaagatactacactaaggaggaacacaaaaacatgaacattttatttgctgtcccctgtaagtacttacaaaacattttggcagagaccaaggggaaaatataacatcttaatgaaaaaggctcagtgggaacccctgaaatctatcaatgccacctagggggatttataacagagggtgaaaaaggctctaggccagtttctgggatgctagcatatatttgctttgtggtgaatgagctaatgcagggtttccaagtgcgccaaacagatgacgcacacactgtgagcttacttaccatgtcctcaggggactttgtccaagaattctccaagtctccttcacctagacgtctaaatctgctgggaaagaggggagaaccaagtgacagatggagagaaactccaggatagcacaaagcaaaggatgcagagtcagaaatacacccacggagagagggagcagaggaagaaaacgacagggaggcactgagacctcgagaggtggggaggggaagggaaaacctcatcaacacaggaaacagaaataagtaacccctaatctgctcagtcatcggttctggtaaagcccctttaaatgctgagaatcattttaaaggaaggtaaaagctgctacggttcatggagtacttagtcattccatttgaaacattttaaggagagtaatcaaaagccactgcagtgggagatacaagaattgggttcctgctccaggtcagccatagagtatgtgtgcagtcctgacagtttgcatcccaaggctcggtctcctcatctttatatgatagagggattggcccgggtcagggtccccaacttgtgatctacagccccagaattgagggaattggtaaaatttgcatagaaaaaaattttatttttgtcagcatccaactgaaattcaacatgtccttcaatgatgaatgtaggcaattagtattaataccatccatgactgtcgccaatagaaatcacagacgttttatgtcacattaaggattctgcaaatattttataatatcttttattctcattactacttaaaaactgaagattggctgggtacagtggctcgtgcctgtaatcccagcactttggaaggcaggaggactgtttgagtccaggagttcgagaccagcctaggcaacatagggagagcgtgtctctataaaaaaaatttttttaaatacaaaaatttcaaaaactgaagtttttaaacctgtgtctagatcttatttttaatgtgcattcatgaaacacatatatgactatattacaaatttattttctcttaacattttaataaatagagtttagtcaattttctttgcaattcaatgtattttattctgtttatttagtgataattttctggcacaaacatacacaaacacagagttaacaaaataaatattggactaggctgggcatggtggctcatgcctgtaatcccagcactttgggacgtcgaggcggacggatcacctgaggtcaggagttcaagaccagcctgaccaacatggtgaaagcctgtctctactaaaaatacaaaagtgagccgggcgtagtggtggatgcctataatcccagctacttgggaggctggggcaggagaatcgcttgaacccgggaggcagaggttgcagtgagctaagattgcaccactgcactccagcctcggtaacagagcaagactctgtttcaaaacaaaacaaacaaacaaaaagaaatcttggactagatgtcctctaacatcccttgaatcctgtgaattgattgacagtacaaatgtttgcagatgtcctacatatcaagccctgaagaggttaataatttgcccagcatcttacaggtagcacagagcagagacagaactggaactcaggtctcccccacagaatgtgggcacttaattacatgctacactgagaggtaagtcctctcaaccacttttttctcccaccaccacgtctaaccatctacctgcatcttaccacctgctactatagaaaaattgcctaaaatcaggtcaacttcttcactggtaaatcaagttgcatcttctcttacctacagaagaacatccctctggaaattctcctctctctctcctacatcaacttttccctcattactaaattctacccatcaacccacaaatatactattctttgtcccatctcaaaaaaaatcaatattagttatattgctgcataacaaattatcccccaaagtagcagcttaaaaccagcaaatgtttattctctcacagaatttataaagctcaggatgctgggagtggcttatcctggtggttctgatgcagggccctccatgtagtcatctcaagactcagctggggctggagaatctgcactaggctccctcacctggttactggcaggcctcggctcctcatgggttgttggctagaggcttcagtttctcatcatgtggacctacccatagggctactcaaaatatgacatattttctcacagaatgaaagatccaagagagcagaaaagcaaaagagcatctaaaatggaagctgccatcttttataacctaacttttgaagtgatataccacgacttctgtcatatgctattggccacatgcaccaacccaggtacaacacgagaggggactacacaagggtgttgatagggtttggctgtgtccccactcaaattccatcttgaattcccatgtgttgtaggaaggacctggtgggaggtaattgaatcatgggggcaggtctttcccatgctgttcttgtgatagtgaataattctcatgagacccgatggtattataagggggagtttccctgcccaatctctctctttgcctgctgccatccacgtaagacatgacttgctcctccttgccttctgccatgattgtgaggcctcctcagccatatggaactgtaagtcattaaacctctttctttggtaaattgctcagtcttgtgtacgtctttatcagcagcatgaaaatggactaatacaggtgtgaaaacaaggaggtggggatcactgggagccgtcttggaggctgattgccacaaatcctttccttgcacctacattcttctccatatttctctactccctttagagcaaaactccttaaaaagttgtctatgtcactgtctgtaatttttcttcctccattctcacttgaatcccttctattcagacatttgtctctcatgttctactcttgtcaaggtcactcaggacttccacatggccaaatccattggtcagttctcagtcctcatttcatttgacccattactagcacgtaacacaactgatcactcccttttccttgaaataccttctgcattagacctccgggatatgacattcttctgattctactcctgcctcaccggctgcttaccaggcatttcacagatacgtcaaggcgtggagggggaaatacttagcagtcacagcaaaaactaaataaaccttaaaatgagctcaacaacgatcaatttcagaaaaacattaaaatttgtaaaagagagaaaacattattaaagtttattatttggtcaaacaatgaataatgtctgaacaggcagaatactctctgaacagtttgatcgattttttgcataactatattgagaagattgaataaggaaatttggaagggaaggttgtgcaagaaagatgggatataattttgtaaaatcttaaaagtgatatacacatattatttagaaacatggaagttcttgccagaagcaacagttaaaaagttgaaagtggttacctcacccgtatgctaggtaaattggacaaaccatcacactgaaagttactagaaaatctggagaagaattaactgatgaaaggcattggcgagctaacaaactagtgaagaattgtggagtcaaaatacaggagaaaaaaaaactgagttttttctctggagaggagtgccaattctggaaaaggtgactgagagacatttaaactgtgttttcagctccaaggaattgaaaagacaacaattgaagttcaaatcccaataagcggtgaaactccaactttggttagaaccttaaaaggctataccttaagagaaaaggccagctagaagtaaacccaccctccctcttacagactaaacttagctgtaaatcatctcaatccctaaaattaaactaacgtgatctcagattactggggtcctcattcctttgccagaaaatattataaatccctcagaatgaaggtaacattatcctagtcctcaaattatttctgtaatttttcatgaacaaggacaggctgtcaataaaaaaataaccatctaaatgagggaacataacaacgtgaatgaaaaaccacagacagtagaaacatacccaaagaagttctagataacaaagatttcagatacacatttctaaataactacacttgggatatacaaggagagaaaatgtcataaattttgtcagagagttaaaaactacgaagaaatggaaattttagaaatgagaagcaaagtaactggtattcagaactcaatgcacatagatttaactgcagattagactcaaacaataaaaaatgagggaactgcatagaagtcataaagaaaaaaattcagaataaatcatagagagacaaaggaatgaaatagaggagtgggtgtaaaagatgtaagatatacaatgagaaggtttaacctacgtgtattggaagagaagagagaggacacagaaatagctgaagagatgatagctgacaattttcaaaactgatgaaagacattaagtctcagattcaagagtatctacaaaccccaagcagaataaacaaaaatgagcccacacatattaaagcacattgtagtaaaattgatacaaaccaaagagaaaataacagattaccttgaaaggagcaacaattagactgatatctcactgttgaacagaaataatggaaagcaaaacaaagtggcatctttaagtactaaaagaaaataacttccaatatagaatactatatctagtgaaaatattcaaggatgaagctgaagcgaagatatttacagacacaaaaaaaattgacagaatttgtcatcaactgaaatgatgaaagaaaatgctacaaattactatatcctaaaatagaaggaaatgatcccagattaaaagccagaaagtaacgaatggggaaaaattaattttaaactcttctcttttcacttaatgcctttattactagttcttatttttttgtattaaagttgttacctctaccttcttttttttcatttgtttggcatatttttctcattctcttatatttaaatttttggggtttttgtggcttttttctgataagcaatattattggatttctaatgcaatctgagagtttttatgtttaactatgggattttatcttaatttaatttatttaacactgatatttatgatttgtcttctttcatttttttctgtactttctcattaaaaccacacactaggcagtctcctcatctctgtgaaccatgaaatttgataccttcggtggtctgacacaattgccacaatcttaactcaatgtgcaataggttgaactacccaagtcccaatctaagatccaacctgaggtgacactgatgaacaaaggaatagagacggtaaagcagagttaatctactaacagattatcccaaatgtgtgcaaattagtgtatggtttaggctaagcatttaaaaatgcttctgtgaaccaaatcatgcaaaatgccaaatgtttactctcctttaatctcttaaagttgccaatttttatttctactttgaattctgttttatggtgcaagcatagtctctttttttgtacaaatatttatgatcaattttacccttcatgattttgtttctcaatatttttattcctctattagtcatctaaagtttttcaaaggcactctttaacttctatgcctctaattgccaaagtcaaaaaggaaattttattatttgagtgttgctttttgaaaccaccaatttagccacacttttgcttgtcttcctcccatctttgttaatataatctgggttttaaaagcaaatgactgttatgacatggttattttcatgttatataccttttagagaatggttttttatatttgcatttagctttataatcaaacataccataattgcttgacatctctattttaactattttttaacagtttcagtctttttctttgctatgattaccccaattttagctctttattttgtgcttttctgccaataagaacacatctttagatagacacattgattctgcatctttgaatccctgaaatttaggaagtattttgcgttattttcattcataaaatacacatgacctaccttccttccttccttctttccttccctccttccttcctgtctgcctgcctgccttccttccttccttctttccttccttccttccctcttttctttcttttttgagacagagtctggctctgttgcccagggtggagtgcagtggtgcaatctcagctcactgcaacctctacctcctgggttcaagggattcttatgcctcagcctcccgagtagtagctggcattataggtgcacaccaccatacccggctaatttttgtatttttagtagagacaaggtttcaccatgttgggcaggctggtctcgaactcctggcctgaagagatccaccctccttggcctcccaaagtgctgggattgcaggctttagccaccacaccaggcccaaattacatcatttatttctgacatttagagttgacagtgaaaatttagatcagcttgatgtttttcttcccttaaagacaactttttaaatttgggagtgagtggcctattggggtatttatttttcctttatcctaaaaattcaaaattgttggccggatgcggtggctcatgcctgtaatcccagcactttgggaggctgagacaggtggatcatgaggtcaaaagctcgagaccatcctggctaacatggtgaaaccccatctttaccaaaaatacaaaaaattagctgggcgtggtggtgggcgcctgtagtcctagctactcaggaggctgaggcaggagagtagcataaacccaggaggtagagcttgcagtgagccgagatcgtgccactgcactctagcctgggtgacagagcgagactccgtctcaaaaaaaaaaaaattcaaaattgtttacaatctacatttagttataggtcccttattgaatgattccaatctgcatgaaatatatctttcttcacatcaggaaaaatgaatccattatctccttaatagaacagaaatattagtgcataggaatgctcttcccactgtcacgtctccatttctgtatgtatcttactctttcacagctgccccctttgcttgtcattttcctccacattttcaagcttgtggtccatatcactaatttggctttaagctgtattatttaggcgtcatgctgcctctgaagtggggtttaaatctgcagttgtgtgtttagtttcctaataattcttccttatctcacttcaaagtttatctttttatcttgtaatcacagtctatttcttcgatgtggttctcattgcatagaaccaggcacttttcctggaagagtccacagtccttgctcctccatggaactttaagacatttgtactaactgctcagcaaggccaccagctgctgtaacaattcctgacgccctagacacagactctacatgaaaacaggagcctgatttaaatggaacttggaagtctttagcactacttatttcctagtttgctttgaatgtaccaagacctaatcaatagatcattcattaacaaatgtttattgaacacctgctatgtgcttggtattgaagatagtgagcaaaaaagcctgatctctccctcaagaagctttcatctttattcattattcaatactcacaaaaacaaatacacctcccaagacctactctctcacatcctctctgccaattcatttcatcagctattgctgcagcaaccaactgcacacaggtgggatgacagcaccttgcctcagctattaatatatcaagcaccgcttgtcttctgctccagcgtttctctggagcagttacagtgaaagaacaggaatccattcacccattctgatgcatatgtcaacctgaagaatgtggaagttagtaccctacttcaccgatagggtacaggagccaatgtaaatgctcctttcttttgtcccgcaggtggacatttttgaggttcattctacatggctctttggagagtccttagcaggacaagcctactgcagtgaccaactcattaacacactttcgattgactttccctcctgtcatgtctcagtctttccagtctccacctcctgttccctgggatcactcccccaaactatctaagctctgcttctggggaaccacagtctaaaatttagttacaaatagcaagtgtttttaaggaaaattatgaggtgttaagatagcttctgcaatggacttgatcttgtctggggaatcagtgaaggattctccaagaaaataacattgaggccaggtgcagtggctcacgcctgtaattccagcactttgggaggccgaggcgggcagatcacctgaagtcaggagttcaagatgcacctggccaccatggtgaaaccccatctctactaaaaatatgaaaattagcagggtgtggtggtgggcacctgtaatcccagctactcgggaggctaaggcatgagaatcgcttgaactcaggaggcggaggttgcagtgagccaagatcgtgccactgaactccagcctgggggacagagcgagactctgtctccaaacaaaaagaaaagaaaagaatattgaaacagatatttggataataagatgatacgcactggcagtagagggatgaggaggacattccagatggggaaatcagtattttcaaaacctttgggttagaaaggatgctggaacatttgagagactgtaagaaagtcagtgtcacatgcatccaaacacagaagggaaggtaggtgggaggggaggtggagaaaggccaatccatgtaggcattggcgcaggaacatgactaaggctttgttctaagagcaatgagaaacctctgaggcatttagacaagtgaattgatgtgattagggttggttttcaaaggtcacttctgctgctttgtggagaacctattgggaagaagtgatgctggatgtagggatgatgattacggagctagcacagtgatccaggcaagagatgaaggagctgagctgggtggttgcttagagatggggaaaagtggacagatttaagagatggaagaggttgatggaacttggtgatggcttgactatgaatcagatgggaagggatggtaattaattgaacatctcaaccaaaaatgatgaagttcccttaaagcttccatccttaggctaggcagggtggaaaaacaagaagtaatagacacagtctgacattcagagaggtaatgattcagtcataaaggtagaatgcatgaaatatctgaaaacctgctgctggcttcacgaaagtgtgttctgggtggatagaacatgaaataggagatcctcccagtcagagatacgagtattccacctaatgctctgtgatgatgatgacggtgatgatgccgatgatgacaataacaatgacaataatgatacaaaagttaatgttcaccaaatggtttcgatatgacaggtgtggtgctagtgaagaatgtggactccatccttagggaacagggaaatgtgtcgtgtgttaagaaatatggccatcatccttagcaaactaatacaggaacagaaaatcaaatattgcatgttctcccttataagtttgggagctaaatgatgggaacacatggagacatagagggaaacaacacacactggggcctatcggagggcggtgggtggagggtagaaggaggaagaagatcaagaaaaatcagtaatgggtactagggcttaatacctgtgggatgagataatctgtacaaaacaaccccatgacacaagtttacctatgtaacaaacctgcatttgtactccttaccttaaaataaaagttaattttttttttttgagacagagtctggctctgttgcccaggctggagtgcagcagcctgatcttggctcactgcaacctccacctaacgggttcaagagattctcctgcctcagcctcccgagtagctgggattacaggtgcccgctgccatgcccagctgatttttgtatttttactagagatgaagtttcaccatgttggccgggctggtctcaaactcctgacctcaagagatccacctgccttggcctctcaaagtgctgggattacaggcgtgagccaccatgcctggccaaaaaattttaatttaattcaaaaaaagaaattagtgatttgatcagatttgcactctgggtttctatgtagacaagagatcagagggtccaagttaaaaaacaaagaggagtagaccagttgagaggctgctgcaatcattcagatataggatggagctctgtagcagatgtggtcagtaacctgctcatgcccaccggctctcactgttgctgtatatacccagggcatctcactgtctgagggctttctctgactgttgaaccatgctagggttatgtgcggggcagaccagaagtcttaaggagttaatagccccaggcatgaccctcaacaagagaggggcagagatgataaatactccaggttcctcatctctcaggtgggcaccaccaagttcccagcatgactgagcctcagctgcccactaatctgctccttagtcatcctgtagggctgccttcccttccctgtctcacttccccactcccccaccagaaacttctaagatcatctcccaaataaactacttatactcagattcttatctcagggtttgcttataggagatcccaacctaagataagtccttgaccaggtggcagtggggctacagagaagcctccaatgtaagacatatcagaggttggtgatgtttcttatgggaagccatgagacagctgggactatggtttcttgtactttcaaccagcgaaggggccacccaagatccacaagagatctaggttgatggacactcaaggaaaatgagcctggtttgttaccaagacaccctagtcccaaattccattgtggagtccccagcccttgtaaattaggctagatcatagcagccacaggaactcatcttgtttctttactcaaacacacacactaaaggcatagtggttgttgtagtagttatttagttctgagtaacatattactgcaaacttagtggcttaaaacaacagtaagctttattattttcacagtttctgtgactcagaattctgaagcaacttagatgggtggttctgtctcagggtattttatgaggttacatcagatttcagctggggctgactcatctgaaggctcaactggagggtccatttccaaggtggctcactcactggatggcaagttggtgctgactcttgctggagagcctcagcccctctctatgtggactcctcccagggatacttgagtgcccttacgacatggcagctggcttacctccgaatgagtgatgagagagagctaggttgaaactatccttttgatgacctagccacaggagtcacatagcagcatttccatcacattccatagttagaggccagtcactaaaacaagctcactttcaagggaaagataattagtttacgccttttgaagggaagattgtcaaagaatttgggggcatactttaagatcaccacagttgcctaattgatccatttccctagattctcaccctaatcttgaacgtgatgatctttccaatcctatgacaagaaagaagctggaagccgaggcagggggattgctcgagcctgggagctcgaggctgcagtgaactatgatggcatgactgcactccagcctgggtgacagagcaagatcccatgttaaaagaagaagtggagaaggaaggaaggaaggaaggaaggaaggaaggaaggaaggaaggagagagagaaaagaaaagagaaaaaagaagagaagagaaggaagctggctggaaaagatgaacacagggaaatgagtgtcgaagtgaagacagaagttcctctttgaaccaagaacagatctggtccaaactgcccctccctggctttctgaggcacttcttaccacaccttagagcccaagagatcatgtttgtgaggccctccatggcaagcagcaagaatggaatcttcataattcagaaagaaaatgagtgtattggaaagttgcagggatgttaacaaaatcaaagagaaagattcttttttcttcttctctctgcttatctgttttctcaatagtgaacttacattcctgttacaagaaaaaaacaataaaaatgtttttaaagaaggactctgaaattattaggttaaaatagaaactcgaattatatggtgctgtcaagagacaaactaaaacaaaacccatttttaactttgaaaagttaaaaataaatatttaaaaaaagtcaagatttatcaggcaaacgcaaaatggcaagaataacaaaattagtttcagactacatagaattcaaggcattaaaagggaacaaagagattcattttatattgaagaaaagtagagtccttaatgaagatagaagagatatagcagctggtcccatagccattaaacatgttttatctctactctagtgacaggtgtcagagaatccctggggttcctttaaaaggataattcctattgagttataaaaagtgatgggataaaataaaattataagtggacttcatagtctcttagtaaaattcagacttgagttaaaaatgtatgtaagaaatataggcctctgaaaagagggaacaaaataggattattcctattgaatcataaaaagtgatggggtaaaataaaattataagtaggtttcatagtcttttagtaaaatgcagacttgagttaaaaagctacataagaaaaacaggcctctgagaactggggacaaaacaggacagtgaagaaaaaacatggaatcggcagttggctatctgcaaagggcacctcccactcccatgtcatgatggcctgggaatggaaggaaccagaagcaccaactgaacaggcctggagtgggctgcagctacaaccgccctgagggaggatctgactgtgtactggggtggtaagaaggaattcaggttttggacaaatgtgtccatccaggtccgtgtctcagaccttccagcattctacagcgtcctgatgcttctcccattcttgtcaggccagagaaggccaaggaaggcatggaccgcagcacagcaaatccacattatgcggctgtttctttctccaggagtcagggacacaacttgctgcatggcttcctgcaggcaggaaaacaaaagcagaaaaaggctcagtctcctagtgccctggaggagccagaataggacaccggaattcaggggtcacaacagttagagatgcttcatctgggacccagggatagaatttgggtaaacatggatggaaaaactatacccttttgttttcacttttctgtaactgaaattgggcatttccttcatttgacgatggaagcaacaagccacaggagtgatggcagaattcatggctataactaaaagaaatcccggagtttcaagtcacatgacagctggcgcagatacctcagaatgccacctccattcagatgggacttaaaaatcacagccacctggctgctagatctggttatttagtacttaaataaacatgaacatttattattatgtcatcaattttttttgagacagggtcttgctccgttgcccaggctggagtgcaatggcgcaagtttggctcactgcaacctccacctcccgggttcaagcgattctcccactcacctcagcctcccgagtagctaggattacaggtgtgagccaccactcccggctcatttttgtatttttagtagaggtggggtttcattatgttggccaggttggtcttgaactcctagcctcaagtgatctgcccgccttggcctcccaaagtgctaagattacaggcgtgagccaccacgccctgcccatcaatttggtttttgtaaaagtattttgagaactgtttttcagtgtaattgatttcctttgcagttctaaatgttttattttttaaaggtaaaattctgaaaaggtttcataagcttcaccagattgtcaaaggggtctgtggtccaaaggaggctgagacccctgatgattagatgccttgccctctccccactgcccctcaagccccttaaagaggggagtagagccagagggcaccagaacatctcaccccacccctctgcacccccaggaggagtgaaggaactacagaatacggagttttgtggaatttgttaattcagtctttttttcttttcttctccctctcctttcctgctcccacttccctcatatcacagccctccaaagtgacccatgctgagactacctaatatgtaatcatccacatttggatccgtgctcttattttaatattcaaacatgaatttgcatatatgcatatacttatgtattgacatatatgcatatacatagcgattttccagccttttcccatgcataagagaagcatcataaataaatggagaagagatggattttctgagataatatatactcaataattttatatgtaatatattgccaaaaactggaatcacaagacatatgccattcaaaatgctgttttcttctcattaatgtcgtattttttctgtagtgttgaattctatttaaaaactgtaggccgggtgcagtggctcacacctgtaatcccagcactttgggaggccaaggcgggtggatcacgagttcaggagatcaagaccatcctggctaacacagtgaaaccccgtctctactaaaaatacaaaaaaacaattagctgggcgggcgcctgtagtcccagctacttgggaggctgaggcaggagaatggcatgaacccaggaggaggagctcgcagtgagcccagatagtgccactgcactccagcctgggcgacagaacgagactccatctcaaaaaaaaaaaaaaaactgtttctaatgactgcatatatgtcacataaaaatgcaaccaaacatatttaatcatctccccattagacattaacattttccaattttttcttaaaaatgctatgatgggacaggtgcagtggctcacacctgtaatccctgcactttgggaggctgaggtgggcagatcacttgaggtcaggaattcgagaccagcctggccaacatggtgaaacctcatctctactaaaaatacaaaaattagccgggcatggttgtgcatgtctttaatcccagctactcaggaggctgaggcaagagaatcacttgaacctgggaggcagaagttgcagtgggccgagatcacaccattgcactcgagcctgggcaacaaagtgagactccatctcaaaaaaaaaaaaaaaagtacctattatgaactacgtgaaataatccttgcattatatattaggttgaactccatcaaattgatgtcttcatggctcaaaactatattatcaatttcatatgagtcaattaattaatattaacattattcctggagttatgttttctctaccacttttccatcagcccctagtccagattcatactgttctatttagtacagctttgtgatatgttttaatctggtataagtttgccctcattttaaataaaatgttcttacttatttttttcttccagggtaacacaagagaaatttagaattatttcactgatttcccatgaaagtcccattaagacttttcattaaaactattttaaaattacaaatgatatataaaagaatttgtagaatgttattttttgcggtttcctaaccaggaccataatttgatgttgtacttattaaagttttttttttcaagctagtttctcagtgaaacttttcattaaaaaagaattggagttcctactcatttttggttacatttttgcttaggcttttcatactttgttattgttacaaatgaagattttcctttctactttccaggttataattgttggcacatagaaaaacacttttctaagatattgcttttgtatccaaccacctaatttacaatctcatttttaacacggcatttgcaattgatttttttcgtttcttgtgttaaattataacatcttcaaataatgacagtgttttttaaaaaatcctcttcttttccaagtgttaaaaaatattattcctaacatttcttattaaaatgaccagaactcccaaattttcaaattaaaagagtactctgccttctggtttttgttttagtgagaatgcctgctgtgatctaaatgttgaaatcctaacccccaaggtgatagtattaggagatggggcctttgggagatacttaggtcatgaggagccctcatgattgggataagtgctcttataaaagagaccccagagagccggctatcccctgccacatgagaggacacagcaagaaggtaccatccatggggaaggaggagacttccttgtcagacaccgaatctgccagtgccttgatcttggactttgcaggcttcagaactgaaagaaataaatttctgttgtttacaagctacccagttgatggtatttcattatcgcagcccgaagggactaaagcaatgcctttattgtttaaatgtcaggaatggcattcactgtgattatagtagaatgctgttataatagtcagtataagtacattgatggtcctaggcagtggtcctctgctcctggtttacaatgagtttcctctcagtaatgatgactgagttgtaattgattatgctcaggatttattgagatgaccatatattttctttttttaaggaaaatttctattattttaattatttttatgtacagaaaactcaacagcgtacatttaacccagtttagtcgcaagttctttagccttcgccttttttagcttggtgatgcgagccacagacttgggacccaggacattacctccccagtgacagcagatctcatcgtatctgtcgctgtaattggtcctgatagtttccaccagcttagccaaagctcctttgtcttccaagttaacctgtgcgaaggcagcagtggtgcctctcttcttgtggactagaagtcccagtcttgacttccccttgataaagcagtaagggccccccattttttatgacacagggcaggcaggaagacaaccagctagaagaaagcactagctgaagagcatattttgaccaaaagcagtaaatttcaaagctagctgggtagcaactgctctgggttaaaaagttcacgtatctgcccttcaaggcagatgactatatattttctaatgtttcctatgggtttgatgtgtgatatttagatttctccatagcaagcaattctcccattcttgggttagatgctgttaggggaagggtcactctggcagaggcaggtctgcacacctgggttgttgcttttgcacacacacacccgccccattttacactgcacaccgcagaacttcaccgtttcacacattcagaaatgaaggcctccgtggtgtaaacaagttgcccaaagcaacacagcttccaggacggaaacctttggattgttggtccagtcgatttaactgtatctgaatggtgtttgattgcttgtgtgatcctggctgggaatattctcctttctggacttcagtttccccataagaccatatactcttctgtagacattcattctacagtccaggagagtacctggaagggacattaatttctctctcccttttccccacggcctatgcattattgtttcaagcccatctcccccatggcccatctacccgcagccagctctgacctgaaggccgggtcaaaggggtgctaggaattccaggtcggtgattggccttcttctcttactctatgtagactccagcctacaattcctagtagggaaagaataaccatctctaatttgcaagagctcagggtctcgggtacagacaggaactggcccctgccaggggcattcccagggcgttgctcctgggatgggcagagggaccagtgggcaggccagtaatgccaacattcagagggtcctcctgcgggcgggggcttcctggaggaggtggccctcaagaggggcttgctttcgatagtgggggtgttgtattccgtgcggaaggaccctcccgttgtgtggaggaaccgcacagtccctttaatgtggtatgctggtacagtcactccatcttgacgcctagccccacccccaaacgttttcaagccaaagcaaacagaagcaaggcccaggtttaaacttaagaggctgccttcagattttgtttacttatccagatttgcaatctttcaggacccaccaaggccagtttctttttcagactttgcactaggctatgagggcagggggtggcgggcagggcaacgtcccataccgtctaaatcgcgcccatacgctgccacctgggaaagggggcagaaaggggcggcggtgctctaaagtgaggcggagctggagggctctgaggaaatgccccggggcaccccctccccaaggcagcctggagtggacgcgcggctgccaggcttcccgcggaggacgcgaccccggcggtgcccgaggctggcgcgccctctcgcggccacgccgggaacgccgccggctgagaccctcgcgtcctcggagaagcctgtggttggttccagcctaggcccggcgggcagcagcccacgctgggtgtttgagggcagtgaggaaaaggacctgtctgcagagatcgtctctgctgcagtccttctgcagtccacgctggggaatgccctggtcagcgcgacagagtcctccgctctccccggcatcccctgtccaagcatttctcctctgcccccagctgtcagctacccctccccttgcctcttttgctcgactccttgaattaactcagcctcgtaggggtgttgatgactgcttattcctccctttacctctagcccagcaggatatttcacaactttcctccaaagcagcggtcaagatctgagttagctccacggcttgctgactctcctcatgctcgggttcctcatctatgaaacggggataactgtagtatctgcgtcctgatttggtgtaaggttagtgagttactacgtgtgtagcagacccgtgcctccacacattccctcggtgcccctccttcttcctgtgcccctgtcctctgcgtgccttctctgtggggagacagccagcatcttcttgcttctctgttgcagggctgtcccaggctgctggagcctccctggaccacatgcagcagcctggaagtgccagggatcaggggacgtatttacctatattagagttccccagagaaacagaacttatgggattacatatatacatgtatacatatgcgtgtgtgtatatatacgtatatgtatgtatgcatgtgtgtgtatacatatatatgtgtgtgtacatatatatatatgagagagagaaatcgatttattataagggattgcctcatgatcatgaaggctgacaagtcccaagatctgcattggcaagccaggagatcccatggttggttccagtcctaaagctgccaggctcaagagccaatgtttcagtccaagtccaaaggcaagaagcaagttgatgtcccaacttgaaggtagtcgggaaggagaaattccctcttaattggaggacgttccacattattgttctattcaggccttgagcggattggacaaggcccacccacattgcagaggtcaatcagccttactgatttaaatgttaatctcatctaaaaacaccctatcacagaaacactcagaatgtttgactaaacatccagacaacctgcgacccagccaagttggcacataaaagtaaccatcacagcccccgagggcagatcttcatcatgacaggtggttggggaagcaggagccacactgcagctccactctgcactctcgcctggcctccttcccttcccagtcccaattcctcactccctgggttttcctgaggcctaccccttagtaaattactttcaagtgaatcttccttcaagggtaggaatctgctccttgacattccttattcaccatccttctgcccgggttggacggatcccctcctggtgctggaacagtctgttccttccacaggatgctcagaatgtaaaccatcattgcaaagactgaggcttcacaaggaagattccttcaaactcatggtaaaacataaactgaaaacatgagaaattgcatatttttctgcccatctcctgggcacacagaaggacacaaagagcttggctcctcacatcaccttcatgggcactttatcaacgataacatgagaacaagtctggctgataacaggattacgtgattgtaattagatggataattattcacacgtggaagggtttgatgactgggtcttgagaataggagctataaatacacatattagaaaaggattccattaaaagtgaacctaaagcaattgaaaagcttctgatggatcattagccatttaaagagatttttgttgctaatgtgtcactcttttcaccttttactaaaaagcttcaaaaaggaaatcaaagcatctgacattgtaatgtaaatcaatggggagaaggcattaaatttataaaagttcagtttttatgcagcttctcctaaacccagctgtgatacaaattgaagtctactttgtgtacattggcataaaatgaggtccattataaacatatattttagtaaattcaatgtgatgtagatgcaggttgaatacagcagccagttacttaaattgaatgggctgaatttcccagaagaaaatctgaaatgaacatgaaatgctgttactctgcttcaactaaccagacactctttagacgaaagtgtgccaggtggaatatcatttcatatagtgttttcagatatccaactgatcttccacatttgcccagccctgccctggtaagcaattacacaaaaatgaaacacccaatgtttgcttattaatttatgccacggacagctatcagttgcatttaataggcttctagtccaggaatcagccaagaacaagactcttgagcataaaaggataaatttaaaacacagacttcttttaagaaggcagatttgttatggcacacatatatatgtgatgtctgtgtattttacactgtaaagacatacatcaaatgtagtagtgattatctgtggtataattgttaaaattatagaatagcataaataataattttatctacactcatgtatccaccatcaagcttaaaaatgtaacaccttaaagcaatgcagttgaaaccccctgtgaatgcctccaggaccatgtctgcctgctcatgttccctagagctgaacattatcttgaatctgctattcaccgttcccatgcattcatttcaacattcaccacaaatgtatgcatcctcaaacactgtctagtatgtttaaactttaataaatgaatgcatcataacacatgaaatcctctgcaagttggctttctgcttgtgtttgtgacattcttctggttttgtttttgagaaggagtctcgctctgtcgcccaggctggagtgcagtggtgccatgtctgctcactgcactgcaacctctgcctcccaggttcaagctattctcctgcctcagcctcccgagtagctgagattacagacatgtgccaccatgcctggctaatttttgtatttttagtagggacggagtttcaccatgttggccaagctggtctcgaactcctgacctcaggtgatccacccaccttggccttacaaagtgctgggattacaggcatgagccaccgtgcctgggctgtttgtgagattcttctgtggggatctgtatagctgtaactcactcatgtttatagctgttattttatattgtgtaagtaatcactgttcatttactcatcatattctcctgtgggtggatatttaagttatttctaattgtttgcccttgtcaacactgagactatgaaaaatctttatttatgtatatgaaccatttgaaaataagttgcagaatgtcctataattctttcctcattgttagattcagattatactttttaaatgtacatttgggctataaatttacctctaatgctcattttaccttcattcaacaagttttcattttttaaatattattttttaaagccgtttaacatgttcagagtgcttttctttctctcccatgcatattttggatgttattaaagctcataacaaatagtttaatttatttttagtctttcttttctaacaagtttatcttagaataaaaaatttacctctaaggaccactttagtttcatctcacaaatttggcgaagtaaaattggtattattgcctaagataaatacttcagattttctattatgttttccttattaatccctgaattatttcaattttatttcattgagatcagaaaaatgtggtctgtaaacgaattctttagaatctgttgaaatttcttctgtagctcaatatatggtcaattttgggaaaggttttatgtggtcttgtgagaaaaaaactgtatgctttcaataattgacaaatggaatctaattaaacttaagagcttctgcacagcaaaagaaactatcaacagagtaaacagacaacctaaagaatgggagaaaatatttgcaaactatgcatctgacaaaggtctaatatccagcatctataaggaacttaaacaaatttacaagggaaaaacaacccccattaaaaattgggcaaaggacatgaacagaccattttcaaaagaagacatacacacagccaacaagcatatgaaaaaaaggtcaatatcactgatcattagagaaatccaaatcgaaaccacagtgagataccatctcacactagtcagaatggctattattaaaagtcaaaaaataacagatgccggtgaggttgcagagagaagggaatgcttatacactgggagtatgtgttggtggaagtgtaaattagttcaaccattgtggaaagcagtgtggtgactccacaaagagctaaaaacagagctaccattcaacccagcaatctcattactgggtatataccctccaaaacataaatcactctatcataaagacacatgcacgcatatgttcactgaagcactattcacaatagcaaagacatagaatcagcctaaatgcccaataatgacagattggataacgaaaatgtggtacacatacactgcggaatactatacagccataaaaaagaataagataatgtcttttgtgggaacgtggatggagctggaggcagttatccttagcaaactaaggcatgtggccccaaatctctaattctgattctgtgtctatttcttttgtgactgtataatttatttatcgttctcacttataagtggaagctaaatgatgagaactcaaggacacaaacaggagaacaaaacacactggggcctacttgaggtgggaggatgggaggaggaagaggagcagaaaatataactattgggtactaggcttagtacctgagttcgatgaaataatatgtacagcaaaccaccatgacatgggtttacctgtaaaacaaacctgcacatgtacccctgaacctaaaagtttaaaaaacatgtatgctttctatggggtcaaagatttctgttctctctctccatttctcttcccctcctccctccctctctctcctctcttccccctttcagcccctccctttatgctcaggtgtattaatcctgattttcttattcattcattcattggccatcctgattctatttcttttcctttcaatctactttttttctttccttctttttttttttttttttttttttttttttttgtctgagacagagtctcgctctgttgcccaggctacagtgcagtggcacaatctcagctcacaacctccacctgctcggttcaagtaattctctgccttaacttcctgagtagctgggattacaggcatgcaccaccgcaccagctaatttttatatttttagtagagatggggtttcaccatgttggccaggctggtctctaactcctgacctcaggtgatccaccagccccagcctcccaaagtgctgggattacaggaatgagccaccatgcctggccatattctttttctcaatgctttaatctattctaagagatgtggccccaaacctctaattctgattctgtgtctatttcttttgtgactgtataatttatttattgttctgagactatccttctaggagcatacaagttcctgtgttgtattttcttggtggactgttccagtatgagacatctctctttgtcttttttactgccttttttcctaaaattttatcttgtctgatattagcattgctgcattgtcttttttagtgtcattaacattggcctggtggttgcccctttcattttaatgttgtagtgtcttttgatttatgtttctcataaacagcatagaactacacttcatgtaattgtggcttttgctctaatccaaaaatatctggatatctagattaggtgactatgaggggtctatcacctatttattttttattgtgattaccattacattggacttatttctgtcacttagtgctgtgtttactacttaacctgcttcccctttgctgactttttttccttctctgacttctggtagattgcacatgctttctttttttatcttatttttattttttattttactttaagttctgggatacgcgtgcagaatgtgcaggtttgttacataagtatacatgtgccatggtggtttgctgcacccatcagcctgtcatctaggttttaagccccacatgcattaggtgtttgtcctaatgctctccctctccttgcccttcacccgccgacaggccctggtatgtgatgttcccctgcctgtgtccacatgttctcactgttcaactcccgcttatgagtgagaacatgtggtgtttggttttctgttcctgtgttagtttgctgagactgatggcttccagcttcatccatgtccctgcaaaggacatgaactcattcttttttatggcagcatagtattccatggtgtatatgtgccatgttttctttatccagtctgtcattgatgggcacttgggttgattccaagtctttgctattgtgaacagtgctgcaataaacatacgtgtgcatgtgtctttacagtagaatgatttataattccttgggtatatactcagtaatgggactgctgggtcaaatttctggttccagatccttgaggaatcgccacactgtcttccacaatggttgaactaatttatactcccaccaacagtgtaaaagtgtttctatttctgcacagcctcgccagcatctgttgtttcctgacttttgaatgatcaccattctaactggcgttgcacatccgttctttattcccttttgttctccctgcctgcttggaatttaaatatttttgttttattcatttagtagttactttcatatttgtcataggcatcttaatttcatatatttctcacaaatcaagacagtgtaccccctttttaaacaaggtttggaattttcagttctttcccttttctcataacttagctcccaccagcaactatgtcattcttatctacagttttagttctgacttcttttaaaacataaattgttcttttgttcacataaattattataattatggctaagtcttttattatatcataattgttatatcataataaaaggcatagcaataatgataataatttatattgttattattttgagtgaatacttaccatatttatcaattatatatgagatatacattgtttcactatttaacttccctgtgatcgtgaggttaaattctgtctttaattataattgattttttttcttagaagttaataaagtagcagtatatcttacataacagtgtatcttataattggtaacatcttagatgggatgaaataaagtgtttagcatcaccaatgtattttcttaccaatctctttgctcattgttgcttcttgcatcccactccttccaaagttcatttttcttcttgctgaaatatattctctaattctcacagtgaggatccatgagttccttattttctgactccttgaatgtctgagaatgtctttattttacactcacgattgaatgatgctttggctgggaatagaattctatgatcacaatttttcccttaccattttacagatagttcttcatttcctctgacatctgtggcttctgattagaagcctgctgtcacctgcctgtgatttatttgtccattatctgtctttcctctctgtcttattaatgttttttctctttatgttttgcagctgcactgcaggtctaggggtgcaattgtcaaggtttccagcttggagttcagtgagccatgtctcgatttctggaaaactctctttggacattacttctccactgaactcttgtctcttttccttcatacttggcttctccattatcattactaaatcctgggattttcccccactcctgtcttttaatttcccagccatgctttcaactgaaagcaatctatactctactgagggtttttttatgaccgcattttcataccccagatttttttttttttttgaggcggagcctctctgtctctcaggctggagtgcagtggcgcaatctcagctcactgcagcctctgcctcctgggttcaagcaattctcctacctcagcctcccgagtagctgggattataggtgtgtgccagcacgcctggctaatttttatatctttagtagagacagggttttgccatgttggccaggctggtctcaaattcctgacctcaggtgatccacctgcctgggcctcctaaagttctaggattacaggtgtgagtcaccgcacctggcccataccccagatttctaaccaagaggtttttttctcccatatctgcctcttctatttcaaaactgcctttcttatcccacaacttcatattatttcatggatactatgctgtcctttatttatgtgagagtttttaacttctaaaaattattatttcacttaatttcatgtttatttttatctattttaatgttttattctttcttcatgtatttatctaaacctgaaagtcttaatgtcattttcagatggctttattatgtctatttcctcaatcataaattcctctatttttgtggatctgtcattcttggtgctagattttctcatgtctttagaatcatgtgtttagaaattcatgtttgacagccccttttccactggagggctttcccacaggtacacctctcttcagggccgttttaaggcttctttttttaaaggatctacagggtgcctagctcccaagcaggtcttatggtagtggcttagcttaggctccacattccaatgggtggagcggttttaggacctggcacaggactgagcacttgtctcatccgcggcctctgcccagctcctggcaagcagcctagaatctggctacagcccatggtgtgtgggcagcattctcagccccttccatgatcaggcagctggtcctggccccgtgccagtgcagggtggccagctcagcccctgccgggcagctttgctatcccagcccctcttaagcccacttgtcttcttagctctccacaagtgtgagctcctgctttcagctgtgaccttctcccatttcttatccagaggcgtgggtttcttgtttttaatcacagtgacattatatttctcatttttatctaactacctagtagcctgtgtgttgggagcagtcaatctctcctgtggacctggcactctggttgaagttcagtgttctaaggcatcctgagatccgcagaggcactgccagctgacggtagggacagtgacatgtgatatgatggtggggacagtggggtgctctggacacacctccagctgctaccagggagctctacttgcaggggtttgtatacaagtttatatacaaaatctctattactaataagccaaatatttggaacccatactctagcccaagcatctcattttccagatggagatgaggctgttagttccaaagccaggcgggaaactaggtctgctcatgtcctgtctgacactctcagaactgcaccaggcataggtctgctaggcgccctgtaatgcccatctcatcccacatgatggggtcacctccctcacttcatccccaagacgaagcagttgggaactcagcccaagaggaaacttacttccaaacccatctggaacactgattcatgtaaccaaaaccacctagctgcccgcctggagaaggttctgggttgtggcactgcaggatccagtaaggcccgggcctctatttacacacatttcaaagagagtggacccctctcaaagctgcagcagcagcgcctcagggaccagtgtccaggaattcccccagctcacctggcagtgctgcctaaaggtttaggtctggccggatgcagtggatcatgctccccctttggcctcccaaagtgctgggattacaggcatgagaccaggagctcaagaacaacttgggcaatatagcaagacccccgtctccaaaacaacaacaacaaaattgtttttaatgagccagttgtatttgtgtgtgcctgttatcccagcttactcgggaggctagggctagaggattgctgagctcagttcaaggctgcagtgagctatgatctatccactgcactccagcctgggtgacagagcgagaccctatccctaaggaaaaaaaaaaatgtagctgaaacattgacccattcgtaaggtaggtgactcagagtgtacttccagctgattctctggcacagctaggagcatccagtcaattactcaaaggattcttgatgatggccaaaatatgtgtggttttgatgatgtctggagaggatgaggatggtgccaacatgttttcatttgagcaactattaccactccacaaagggaaatctgcagatcctgctccttctggtgcatgcgttttctaaaggtggaccctgctggattctggggttccttgcaggtgcctcaggagccatctcagcaacacacgtgtctccttccttagaagcaaccaactgtgctgtgccatggtgaaaaggagctgaactgagacaggagtcgtgtcttcctgggtgacctcaagcctcaagcctacatcaaacatggtaccacatcgtggacaagttactagtcaggatttttcagcctcaagggacaggtgcccaattagacaatgcttaggtggagaaaggagaattgtttgctggtttgtaacaaatttcaagaagggcaggagtccaaacaccatcacctttgctctctccaatgccacgactgtccatgtcatcatcctcatcatttctcaagctgcttttcttaaaagacaggacccataaccatggcccagatcccatctctgcagatcagccccagcaatcacggctttgttgtctccctccagtttagaaaggcccggagaaggagtgtgattaaagcccagctctggggttcgcttctggtttcgaacattctcctggctgtttacgtttacagtttatattactcataactcagagagttctcagtactctaatctgttttattgccgttcttaatgcaagtgtgttgatgtaagcgctctgccagatctttctgttctttgtaatctcccgttctgtataaacgctctgcccttcatactcatcgtgtgctctggacaatggctcttcatcatgtcgggttttcagtaacaatttagttcatttctctctgttggctgttttcctttattgtaagagagggaatacaaggcgttgcttactgaacacctactgacatgttccaattagaaggaggctcttcttggtacaaagcatatctccctaaaccaaaaatacttacttatttttagagaaggggtctctctctgtcacccaggctggatgaggttgttaattccagagccaggctggggtgcagttgcacgattatatctcacaggagcctcaaactactgggctcaagcaaccctctgtccttagccccttgagtagctggaattgcaggcacatggccccatgcccagttaattttctgtttttttgtttttttttttttagagatggggtctcactatgttgcccaggctggtctcaaacacctggcctcaagtgattctccttacttgaggaaggcctcagccttctgagtagctgagattacagacacaagccactgagcctggaaaaccaaaaatatttagataaaccctatgtcagtttccttctaccaatttctacccacatttcagggtcctcacgtgctcccagccgggcatgatatgaaattgactttgttactgaaaatcatgttaacggggccatcctcttattttgcacacatctttatttgtcctttttgcttctcacttatctctggtgcttggaaccaatccatcattttttatggcttctgggctttgtatcatactttgaaaggcctttgtgcctctgaggttataaaagaattctctcttgcttctatcacttttatgagttccctttttagactcctttttagattaagtctgacccatccaggattaattttagtgtaatataaaaggtatagctctaattccacatttttccaagtggcctctcaattctccaaatccccggatttcaatgatccttatttttcccctattgatttaaaactccacctctattatgtagtaaaattccatgtgcattgggtctgattccttaactttcttttgcaaataccttccatcgatctgtctaatctgtttaaatcattataattttgtaacatattctaatatttggtagcattgttctgtccttcattattctccctagaggtttcctagttattctttttttaaataacaaataataattgtacatattcatgaggtacaatgtgatgctttgatgtacgtatacactgaaacgattaaatcaagctaatcaacatatccatcacttcacatatttctcatttttgtggtgataacatttgaagcttactctcttagcagtttttaaatatacaagacgttaattgtagtcaccacgaagctattcctgaatgtttattttttccatggaaactttaaaagcaatgaatctagctcctccaaatcaagtttctattgatttttttgttagtcaccctaaatttttaaattaacttggggagattttgatggtattgagttttcccatccaagaacagggtctgcctttccctttgtccaagtctctgacttctcagaagcatttttgaagtcttaggcaaatcgcttttcacattaaatgtaagcctatatcttccatcttttttaccggtatggtaaatggggcctcttcttccactgtatcttctaactagttgctatttgaaagctattttgttccatatgttaattttgtacttgccactttactgattaccttgctatgtgtaatattttttcattttattttcttggattttctgggtacacaattgtaacaccatctcagatgttgatgattttcctcctcttttctaatttttaaactcctaaaatcattcttttttggttaattgcatcgacctttagaatattaaacagtacagtggtagtggatggcttttctcatcccaaacttatatgaagatgcttctaatgttttcccattaaacgcgatgctcatgtctgggtggagatggatgtattttataccactaaggatgtgtccagctccacattgggtagcaggttggttcttggtttaaaagacatactttctatctggttaaggaagaatccatcacacctatttgtttttcttgttttttcagacaggttcttgctctgttgcacaggctggagtgcagtggtgcatggcctcatgtgatcctcccccttcagtctcctgaatagctgggactacaggaacacgccaccttgcctggctaatgtttctaaatttttgtaaatatggggtcttgctgtgttgtgcaggctcatcacacctgttttacgagaactttaggtttgggactagataacatttagttaattagagcttcagtacccatctaccaaccataagatattcataatctctttgagcttcaggtaaaatgtgataatacgtcccttctagaacactgtaaagtttaattgagaaggaatgaatggaaggcaccaacacagtacttgacacacagcaaatgtgcagtaagtgataattccttccattctcattaacagtatagggtttgttttgttttgttttgtttgtttgtttttgttttagttttcttgagatggagttttgctcttgtctcccaggctggagtgcaatggcacgatctcggctcactgcaacctccacctcccgggtacaagcgattctcccacctcagcctctcgagtagctgggactacaggcacatgccaccatgcccagctaatttttgtctttttagtagagatggggtttcaccatgttggccagactggtctcaaactcctggcctcaagtaatccgcccacctcggcctcccaaagtgctcgaattacaggcatgagccactgcacccggcctacagggcagttctttttggttttcattcttttcgcttttttaaatgaaagcaagtttattgggaagtaaaggaataaaagaatgactactccatcagcagagcagccctttctgggttttcttaatgtgaccatgatgataattttccttgcatccaaactataaactctatttggttaaaatatataaatatcactaatccacataaaatattaatctgattaataaaatacaattttatatttttgccaattgtgagattctcagattggtcccgtaccttttacttttggccttggccgattttttaacttaaaacatgtttgtgtcatgattttttttttccgtgttttggaacatttactgtgctactgtctgggagtgggtgggtaattctcacccacggtgggatcttgaattcctgaccactttggaatgtgttgaccctgcactgcttttactcaacactagggggcagcattgtaaaagaaacctggcgatgcttctcagtagcaccatgaaatgttaaccggattagagcctgagttaaaacgctcttgaaggagtttagtctttgccatttcagtctatttcagaggcctcttcataaaactgtgggtgtatcgccgggtgaggtggctcgcgcctgtaatcccagcactgtgggaggcagaggcgggcggattacttgaggtcaggagttaagaggcgcctggccaacacggagaaaccccatctctactaaaatactaaaaatacaaaaattagccggatatggtgcgagcttgtaatcccagccactcgggaggctgaggcacaagaatcgcttgaatctgggaggtggaggttgcagcctgtgggactgagagggaaaaaaaaaaaaaactgtgagtgtgcaaaaagcactcagtaaatggtgtggactagcacagccacctctctcacctccttcacgttttgattcaaatgtccctgaccaacctgtatgaaactgcagcctgcccactggcctcacctccccatccttcttaccattctctacttctttccatagcatttaacaagttctaacattttaatttccttatttattatggcttattgtgtctccccactttccccctaaaatctaagctctacaggggcatcgtctattttgttcagtggagtaccccaagtgcttagaacagtgtctggcacaaagtagatgcccaaatagttctttgttaatgatgtggaatttgtcatgacagtggtgagggtggtggcaatgtctgaggtaggggcagtggaggtggggaggctggtgacagggtggagataggggtgatgtggcaattgtcatgatgcttactgtactgtggtttggtcagggtcctccggcaagttggaatctaagcctgaggctggatgaggatttctagagatttcacaagggcttatcaccatgtgagcacacacaatgggttcctaggcgaaagtgggggaaactgttcacactcatacatgcatgcatacacacacacatgcatgtgcacacacacatgcacacacacacgtacacacacacacacaagtctgtattcctggccctccaacaaaggtgctgtacaagggagtgatggaggagctaggaaggttgaccaaactatcacttaccgagctcatcatgcaggtttgttcttctaagaaaggattccctatcaccatattgcaggctctaaggtgaagaaacacattcaaaatcatgcctggaaccatcacagtctagcctggtgaggaggttgcaggcagggcccctcctgacatggacagggcacagggcgagatgatcagtgagcagttaccacatatctagataattacaatgataaacacacctaacagactattaaataaaacatgtctatcctcctccattaacaaatacaccctcatgaagccctgcaaggctgctggactctcagaattccacaccaggacacggcagcccggggagaagcccccagctgcccacttccctcatccaacctctgaggggcaccgcacaaaagataccccaatttgcacatcccagctctatccacaccctccacaagaacgctgacccttgggccccctcgggccgagggctgtgcacaaggatagtgctggccccttgggaggacaggccctgggaggcagccatggcaggtcctggaaagcatgcttaaggctttggggctgggaattctagcatcccaggcacccagagcaggggcagaaggaagagggcaagctctggccagatgtgctctgggctgatgggcccctcgcaccctgggggaaacgccagttaggaacctcaaagtccgacacctggggcaggtgcaggtctcctgactgcaagaactaccgggactactgttgttctgcagggcttacaaagcgcatccctgttcaaagaaagtttgaagaatgaagtcagtggtggggtcccctatagctggggaaatagagaagaagaaaggaccttggcaggaagtagcccagccatccctagcagctgagaaattccctccaccagttggcaccctcctcccccaacacttctcaggccacaacagagggaagaaaggctggtctcaaagcacacctccctgggcctgtgtggaaggctggcagcctctggccctggcccatttcctcctcccattaacataaggggctcttggcttccgctggaggtcttcttacttgccttggttgctctccctcagcaacctctccgcactcaaggctgtgactcttacccaccccacatctggattcctcttccaagccatgtctactagatcctccgaggcctgcctctcactccccgtgcagacaacctcgctcccttccctcagcagcagctcctgcacctgccctggccctgctagggagcctcaaaacctttatagatggaggtagtggttgcataaccttgtggatgtactaagcaccatgggattgtacaccttaaaatggttagttttatgttatgtgaatttcacctcaatcaaaaaatgaaattaggctgggtgtggtggctcatgcctgtaatcccagcacttcgggaggctgaggtgggtgggtcactgaggtcaggagttcgagaccagcctgaccaatatggtgaaaccttgtctctactaaaaatacaaaaattagccaggcatggtggtgtgtacttgtagtcccagctactcgggaggctgagacaggagaattgcttgaaccggggagatggaggttgcagtgagctgagatcatgccactgtactccagcctgggcaacagagcaagacttggtctaagaaagaaaaaacagaaagaaagaaaaaacagaaagaaagagaaaggaaggaagaaaggaaggaaggaaggaaggaaggaaggagaagaaagaaagaaaaagaaagaaagaaaggaaggaaggaaggaaagaaaaagaaagaaagaaagagaaagaaagaaagaaagaaagaaagaaagaaagaaagaaagaaagaaagaaagaaagaaagaaaggaagaaagaaagaaagaaagaaaataaaaatgtaaaacatcttctgaggcctcccttggccacactgagccaatgatgtctcaggaatccctgcacccactgctcctccagccagtccttctcatttgtgttaggccctccctgaggatgtggatgttttgaccctgtcactgggcttgggggacaggggccatggctgggaatggaccctgcttatggatacccaaagacagcaagctcttctgacagcaggcattcatgccagagaaggtgggtcctttgcaaaacgcaccctgagatttcccccagaaatctccccagcactaagggtcctagctggacactcatccctccttcagggaccacagatctgcctctaaaccttcatgcgtggactctgcaccgctcactctaaaagaatagggcttgtgtagtctggagccttctatcttatcctgggtaacctccctctgactttctcaacatcctcagcccctgaagatacagcagctaggacagagtcagtctcgaggcctggaggcgagaacccaatgtctttgttatcgggccctctcgttcttccaggtaaacatccctgagcgagggaggtctgaggacagggcgctccttgggcacccctttaaaaagcaacatacattatgattacttcaccctgcaaggccaaattccccagggccaccaccagtgttcattgttgccctgttgctctttctgtccacaccagtggtacgaggagaccctatctcaactctcactccctgagataaatgtgaaatggacaacttatctgtgtctccctccctcgcttgctgccccttctgggaacaggaccccactgaggacaatcgattcacttggctggttggcaaattgcaagaacccctctgcctatgccactgatgcacaatgtctagggctggcacaatgcaaactcctccaagagccagttctgtccctccaggcacacagatactatccatcacagagctggcggcctcaagaatggccatggggagccactgaatgttttgagcaggggtgtgacatgagccagttgggagtagtggttatgtgcaggcattttggtgttgggctgcctggattcagataccagaactgccacctattagctgtggaatctaggacaagtgaccatgcctctctgagcctcagtttcccacctgcaaaatggggataacaacagtacctacctcctagggttgttgtgaggactgagtgggtaaggcccttgcaatagggcctgccatttcatgttaggtaagagttagcttttatgaattcaatctgagctccagctcatggaaagttacttgacatcgctatgtgagttaggaaaacaggctctaaaaccaaaggcccttgcagtgatggaaataagcggtacccacgcctgacatagccaaatggaggtgggatggaggggaagaaagacatttgagccactgagaggcggaagggaaggaccagtgaggtgtgtgaactgggtgggggtggggagggaaaggtgacccaagggaaagagaggccttgagtctaggtgagcaggaggagagtgatgctggctaggaaagcagggtcttggggcaaggcaggagagaggaggtgaggggctatcttcggacctacaaggctcacgaaggaagaggtgatcatcagaaagctgtaaatatggggatgcgtttggagctcaagcaataaatggaggctgaaggttgagctttgaggggaggtcattcaggcagcagtgcaaagctccaagatccatgagatttccaaagggaagaggactgcaagtggagagaagaggggaggggagtagagggaggaaaagaggagaagaaactggacaggaggagtggggagaggaaaggaggccaaacagcctccagggtggtaatgaacaccacagctatggtgtcatacctgagtttgagccccgctctgtcactaactagctgtgtgaccttgggtagattgctgaatctctctgagccttaatttcttaatctgtaaattgggcataatgatagaaactcccatacagggcaatgatgagaattaaataagattgtgtgtgtaaagccctgatttcaatgcctggcaccagggcagagcccagggaatggcagctagggtcattaggattcttatgaaatccaagttaaatgaacagaagaaggaagaggggttagagaaaaggcaacagagtggagctgcttttaaagagccaggagagcatggtggagtgggaggaaaggcagggagatgtttaggaaagcaggagaggccagcaggtgcctggcaccaatcagtacagaggctagaacttagtgctttgggtttggcaactaacatgtctctcgtaacttttgaaaaagcagtgtgattttcaaaaataaagagtaagtggggccaggcgtggtggctcatgcctgtaatcccagcactttgggaggccgaggtgggtggattacttgaggtcaggagtttaggagttcgagaccagcctggccaacagggtgaaaccccgtctctttaaaaatacaaaaattagccgatcgtggtggcgggtgcctgtagtcccagctactcggaggccgaggcaggaaaatcacttgaacccgggaggcggaggttgcagtgagccaagatcacgccactgtactccagcctgggtgacagagcgagactccggctaacaaaaataaataaataaataaataaataaataaataaataaataaataaataataagtgggaaagaccattggaaggtacgttagggtgtcttctggggaagggctgggagtaggcaagtttgaatgccaggccagagagtctggattttatatttagacaattatgtaactttagaggtatttgagtgggtgtcagcctggtgctagtttgggatgatgtatctgggtggggcagagggagagaaggacccacgcatcacacctgcccaggtcaaaattagaatgtgattgacaaggacctaaaattcccatgttgagattttaaccactcgatttctccagggattcagcgattcaggttgactgaagtttaacagcaaagcaagcactaggcagaacagtatcatgcaaagcccctaactctggcatggggagggatgggggacagataaaggagagaggttgggagggagatattgcaggatggagccaggcccaggcaaggtggaagttgcagctgctcagattttttacgattgctcataccgttcacccgcagctcccaaatccggaagactcttcagggacatataaatagtaactgttatttgagaacccgcagagcctcacctgttctagcaactgccggaggcttatttcacttagcataatgtcctctagccacagtgcaacctgtaaatatatacagctattatttgtcaattaaaaaccaccaccaccaccaccactggggggcacttgctgagtgttttatctcagaaggtgacctcgctctccccaggtcttgtcatgataccgtaactaatcacacaacgacaatgagagccaaaaaggatgatatagaggacacacacatgaccagtccacttccttaaaagtacctggggtcttgtgatccggccacctggacagagaacacaacagtcaggggcttgttgagaaacaattgtggttttgcttaattatgaccgaggaactgaagccagtcttctatttatgattggcaaggtggtctcaatgcatctgtcctgcttaagaaagtaacccccgctttccaaatctttccaacttcttcaaattcaaaagtctgagggaggctcagactgcgtgggggtgggggtgttgttcaagatgtggcttgtgggattaatttttggcaggaagatcacagtgttgaatacaatgaaactctgtcctgagaacaggcctctcagggagccgttgctgctctcggactggcagggcctgaggaattcattacaggggatgaaagatctactcagagccaagatttattcctgcctggagaccctggagtcactgcatttccaaaaaaaaagggctcatttcattagactccaagaaagtggattttgggcttctaagagaaggaactatcgtgttcttttaaaatttttgtttggatcattgcagactaactagatgttttccatttgaaacgaccccctttgtatgtctctgccacaggaccacagggtaacagatgtgatttccgtgaaatgcacctaccatgggtcctggaacacagtaggtgctcattaaatactttcttccatctgccccaggtggtcctaaaattttctgagtcagatccaagttctgtgtaaatgcttacatcaaagtggggtctgtggtcttgaattcctccctccaagttagaacccaaaaagtgccctgattctgtagcaactttaagaatctctgtgatttatttgagtgaatcttttaactgaaatagtaataaattgtgacaggccttcacctgttagcagagagtgaccctgaaatgccacctagctttcaggagaaacagtttctaaagtgaggattcaaagcaaaaatacttgtggaaaaaaatgtaacggatgaaatacatgtacattctcctgtttttgatggtggttaggggacacatttttcctgccctacttcttcatttgaagttactttccaaagtaactttcataacttaattacatcttcagtgaccctgtttccaaataaggtcacatttggaggtactacagttaggacctcatggtttctttgtggaagccaaaatcagtccatgtaaatcagctttaataaatgagatagctgccttatgccacaaccccacactgagcaatgtcatttgggtaaatatttcatcccaaccatttgtaatgtaagggttgctgtttgcccagccaacagaagggagtatctgaccttagtccatcattgttacggggagatgcttgttgccatgtggcccactcaagggcaggcagttgaaaccaagcatccaggtgcttccagaccagtctctacacctcctagactttgctctcagttctctgtcccattatgggaatgtgtgcctagaaaacgggttgtcctgactttgagtttgtgatgcatcttgtatgtctgtttgtctctcccatgtttaagcataccaggtcactagttcccaattgtactaatttcctaaagctactgtaacaaagtaccacaaactattttgttgcttaaaacaacatagagttactcccttacagctctggaggctagaagtctgaaatcaaggtgccggcagggttgatctttctcaggactctgggagaatttgctccacacttctggtaacaaccagcaatccttggagttccttggcttacagatacaccattccaatttcggccttgcaggggcctagggaaaatgtcccctttgccctctgaaggttcactgaaaatcaactgacagaaggcagattcattaggagaaaagacaaacaaacttatttggtcatagtttgtatcacccaggagccttcaaaatgaagacccaaagatatagggaaactggccatttttatgcttaggttcaacaaactacgggcagctatgtagaaatataaggggacaaagaggataagatctaatgttaataggctgagtggggaaacccatgaaggctgtctgttagattcctcttggcctctctgtagagcgttccttctgtattagtctgttctcacactactaataaagacatacccaagactgtgtatttttgtaaaggaaagaggtttaattgactcaaagttcagcagggctggggaggcctcaggaaacttacaatcattgtggaagaggaagcaaacatgtccttcttcatgtggcagcagcaaggagaagtgcagagcgaaggaggggaaagccccttctaaaacgttcagatctcatgagaactcactcactatcacaagaacagcatggaggtaactgcccccatgattaaattaccttccaccaggtctctccatgatatatggggattatgggaactacaattcaagatgagatttgggtggggacacagccaaaccataatactttctttctgtgtgtggggcaggactatctctggaacgggggccttataagctcttatcagatgagataagtcaaataattaatgtctttatggccagtttttataccaaatggcagagagggagagggaaagttagactatttttaggttttatggctggcttgggggaaagggggctctggtttctatggcccaccttggggaagaggctgttgctgaggctttcattttggggtgtccagttctcatttctaccagcaatcttaccacatggccatcttccctctgtgtctgtgtccaaattgttctctttttggaagaacaccaatcacattgaactaggggcccacccatcctactccagtgtgaactcattataacttaattacatcttcaatgaccctatttacaaataacactacattttgagatactagatttaggacttcaacacatcttttgtaatggacacaattcaatctataacaccaaccagaggttttcttactgttttcctctacattttgaaacattttgcttaccaagcaaaatacattagtgaatatttgttttcctgttttgttttttttttaaatcagtcacccaaatgggctttctgttccagaagaagatggcactgagtcacttttctctgttgttaccctctaaatacaactacataccccgctaattagtcaatggaccatgatacaaggactctgaaagccgagagaaggaaggcagactggctgggagcttcaagacttgagaggtctggtgagtcccctaggtttcctttttatctcccacgtaccttcaggctgggcacccgatgggcctgcaacttggaaccaccaacaggaatagacaaaataatccaagagaagcctgctttgtccagccaaacgaaagggaaagcccagcagagcctgagttgggatcctgaatcctccttccacaaccagagtccctgcagcccgtctgatccaccagctgggctggcatcagccgagctctgtgtctccctgttctctgttgagattccacagtgtgcttccacccccagagagcaccagcaaaggctgagtgtgaaccccagcaataccaggagaacaaagaggaaaaacaaaacaaaaccagaatagaattcaaagggctcagaaaactaaactgtcattgatacaaatgcccacaaaagtcgaccagatcctatgaatcaaacctaaacaaggtgaagcctcattgaaacagaagacttaggatcaagaatctccagctgggcatggtggcacatgcctatagtcccgggactttgtgaggccgaggtgggtggatcacctgaggtcaggagttcgagaccagcctgggcaacatggtgaaaccccgtctctactaaaaatacaaaattagccgagcatggtggcacctgcctgtagtctcagctatctgggaggttgagtcaggagaattgcttgaacccgggaggcggaggttgcagtgagctgagattatgccattgcactcaagcctgggcaacaagagcaaaaaaccctgtctcaaaacataaaaaaatttaaaacaacaaaaaacaaaaaagagtctcctgacagaagaatcaaaatgtccaggatgcagtaaaaaactgcaccatatccagaactcagaatgtttttcctactctctactctcacacactcctcaacacaatgcttctgacactagatgtgtgagggtttctcctcacacacaaagcaagcaattctccactggacaccagctggatgtcccctaatttaattcaattctgacactttctacttggagatagcatcagatcccacaggttggtaactctaccaggttcgttgcccgatgcactgagacacagggttgcagcagagaaagaggtttaatcataaggcagccaaatgagggggaggaaacctcaaatccaccgcccagaggagtttggggccagaggtttttaggggtttggagtgggctgaggtctggggaatcactgattggtcgaagggtgcagggtaaagccaggagacagggagatgaagaaactgtattctcaagctgatctggttccctgttgtggggggtcttcaaactggtgggtgtcagccgttgctgctggaattcaggatctgaaaaacatcttaagcaattcataaaagccttatgattctaacatcagaagttccgtctataggaacaatggggatgaaaatagtctagtgcgcgactttcagttagcaagcagccccaagggagtgggccagagtgcagcctgaccaatgcttacttataactatatttctttttatttgtttatttgtttgttttttaattatactttaaattctaagatacatgtgcagaacgtgcaggtttgttgtatatgtatacacgtgccatggtagttggctgcactcatcaacccaccatctacattaggtatttctcctgatgctatccttccccttgcccctcatcccgacaggccgtggtgtgtgatgttcccctccccattatcatgtgttctcattgttcaactcccacttataagtgagaacatgcagtgtttgcttttctgttcctgtgttagtttgttgagaattatgatttccagcttcatccatgtccctgcaaaggacatgaactcatccattttccatagctgcatagtactccatggtgtatatgtgccacattttctttatctagtctatcattgatgggcatttgggttggttccaagtctttgctattgcgaacagtgccgcagtaaacatatgtgtgcatgtgtctttatagtagaatgatttataatcctttggatatgtacccagtaatgggagggtatttcaggatctacatccttggggaattgccacactgtcttccacaatggttgaactactttacactcccaccaacaatgtaaaagcgttcttatttctccacatcctctccagcctctgttgtttcctgactttttaatgatcaccattctaactggtgtgagatggcatctcattgtggtttttgatttgcattactttaatgaccagtgatgatgagctttttttcatatgtttgctggccacataaatgacttctttcgagaagtgtctgttcatatcctttgcccactttttgatggggttgtttttttcttgtaaatttgtttaagttctttgtagattctggatattagccctttgtcagaaggagagattgcaaaaattttctcctattctgtaggttgccttttcaccctgatgatagtttcttttgctgtgcagaagctctttagtttaattagatcccatctgtcaattttgacttttgttgccattgcttttggtgttttagtcatgaagtctttgcccatgcctatgtcctgaatggtattgcctaggttttcttctagggtttttatgattttaggtcttacatttaagtctttaatccatcttgagttaatttttgtataaggtgtaaggaaggggtctagttccagttttctgcatatggctagccagttttcccaacaccatttattaaatagggaattctttccccatggcttgtttttgtcaggtttgtcaaagatcagatgcttgtagatgtgtggcgttatttctgaggcctctgttctgttccgttggtctatatctctgttttggtaccagtaccgtgcttttttggttactgtaaccttgtagtatagtttgaagtcaggtagtgtgatgcctccagctttgtcctttttgcttaggattgtcttggctatacaggctctttcttggtttcatatgaaatttgaagtagttttttctaattctgtgaagaaagtcaatggtagcttatagcattactttgggcagtatggccattttcacaatattgattcttcctatctatgagcatggaatgtttttccatttgtttgtgtcctgtcttatttccttgtgcagtggtttgtagttctacttgaagaggtccttcacatcccttgtaagttttattcctaggtattttattctttttgtagcaattctgaatgggagttcactcatgatttggctctctgtttgtctgttattggtgtataggaatgcttgtgacttttgcacattgattttgtatcctgagactttgctgaagttgcttatcagattaaggcgattttaggctgaggtgatggggttttctaaatatacagtcatgtcatctgcaaacagagacaatttgactttctcttttcctatttgaataccctttctttctttctttctcttgcctgattgccctggtgagaacttccaatacatgttgaataggagtggtgagagagggcatccttgtcttgtgctggttttcaaagggagtgcttccagcttttgcccattcagtatgatattggctatgggtttgtcataaatagctcttattattttgagatatgctccatcaatatctagtttattgagagttttcagcatgaaggggtgttgaattttatcaaaggcattttctgcatctattgagatactcatgtggtttttgtctttggttttgtttatgtgatggattacgtttattgatttgcatatgttgaaccagccttgcatcccagggataaagccgacttgatcatggtggataagctttttgatgtgctgctgaattcagtttgccagtattttattgaggattttcgcattgatgttcatcagggatattggcctgaaattttctttttttgttgtgtctctgccaagttttggtatcaggctgatgctggcctcataaaatgagttagggaggagtccctctttttctattgtttggaatagtttcagaaggaatggtaccagctcttctttctacctctggtagaattcggctgtgaatctgtctggtcctgggcttttttttggttggtaggctattaattactgcctcaatttcagaacttgttattggtctattcagtgattcaacttcttcctggtttagtcttgggagggtgtatgtgtccaggaatgtatccatttcttctagattttctagtttatttgagtggaggtgtttatagtattctctgatggtagtttgtatttctgtgggatcgatggtgatatcccctttatcatgttttattgtgtctgtttgattcttctctcttctttattagtctggctagcagtctattttgttaattttttcaaaaaaccagctcctggattcattgattttttgaagggtttttttgtgtctctatctcctccagttctgctctgatcttagttatttcttgccttctgctagcttttgaatttgtttgctcttgcttctctagttcttttaattgtgatgttagggtgtcaatttaagatctttcctgctttctcctgtgggcatttggtgctataaatttccctctaaatactgctttagctgtgtcccagagattctggtacattgcgtctttgttcccattggtttcaaaaaacttattatttctcccttaattttgttatttacccagtagcaattcaggagcaggttgttccatttccatgtagttgcacagttttgagggagtttcttaatcctgggttctaatttgattgcattgtgggctgagacactgtctgttatgatttctgttcttttttgtttgctgaggagtgttttacttccaattatgtggtcaattctagaataagtgtgatgtggtgctgagaagaatgtattgatttggggtggagagttctgtagatttctattaggtctgcttggtccagggttgagttcaagtcctgaatatccttgctaattttctgtcttgttgatttgtctaatattgaaagtggcatgttaaagtctcccactattattgtatgggagtctaggtttctttgtaggtttctaagaacttgctttatgaatctgggtgctcctatattgggtgcatatatatttaggatagttagctcttcttgttgctttgatccctttaccattatgtaatggccttctctgtctttttcaatctttgctagtttaaagtctgttttatcagagactaggattgcaacccctgcttttttttatttatttttattttttattttttgctttctatttgcttggtaaatattcctccatccttttagtttgagcctatgtgtgtctttgcatgtgagatgggtctcctgaatacagcacactgatggtcttgactctctatccaatttgccagtctgtgtcttttcattagggcatttagtccatttacatttaaggttaatattgttatgtgtgaatttgatcctgtcattatgatgctagctggttattttgcccattagttgatgcagtttctttctttttttttttttttttttgagatggaggctcactctgtcacccaggctggagtgcagtggcgtgatctccgctcactgcaagctctgcctcccgggttcaggccattctcctgcctcagcctcccgagtagctgggactacaggcgcctgcaaccacgcccggctaaattttttttgtatttttagtagagacggggtttcaccatgttagacaggatgatctcaatctcctgacctcgtgatctgcccacctcagcctcccaaagtgctgggattacaggcgtgagccaccacgcccggctgatgcagtttcttcatagtgtcaatggtctttacaatttagtgtgtttttgtaagggctggtaccggtttttcctttccatacttagtgcttccttcaggagctcttgtaaggcaggcctggtggtgacaaaatctctcagtatttcttgtctgtaaaggattttatttctcctttgcttatgaagcttagtttggtgggatatgaaattctgggttgaaaattgttttctttaagaatgttgaatattggcccccactctcttctggcttgtagggtttctgcagaatgatccactgttagtctgatgggcttccctttggggtaacctgacctttctctctggctgcccttgacattatttcgtttatttcaactttggtgaatctgacgattatgtgtcttggggttgctcttcttgaggattatctttgtggtgttctctgtacttcctgaatttgaatcttggcctgtcttgctaggttggggaaattctcctggataatatcctgaagagtgttttccaacttggttccattctccccatcactttcaggcacaccaatcaaacgtaggtttggtcttttgcacatagtcccatgtttcttggaggttttgttcattccttttcattcttttttctctaatcttgtcttaacactttattccattaagttgatcttcaatctctgatatcctttcttctgcttgatcaattcagctattgatacttgtgtatgcttcaagaagttcttgtgctatgtttttcagctccatcaggtcatttgtgttcttctccaaactgattactctagttagcaattcctctagccttttttcaaggttcttagcttccttgcattgggttataacatgctcctttaactcggaggagtttgttattacccaccttctgaagcctacttctgtcaattcgtcaaactctttctctgtccagttttgttcccttgctggcgaggagttgtgatcctttggaggagaagaggcattctggtttttggaattttcagcctttttgcgctggattttcctcatcttcatggatttatctacctttggtctttgatgttggtgaccttcggatggggtttctgtgtggacatactttttgttgatattgatgctatttctttctgtttgttagttttccttttaacagtcaggcccctctgctgcaggtctgctggagtttgctggaggttcactccagaccctgtttgcctgggtatcaccagcaaaggctgcagaacagcaaagattgttgcctgttccttcctctggaagctttgtcccagaggggcactcaccagatgccagccggagctctcctgtatgagctgtctgtcaacccctgctgggtggtgtctcccagtcaggaggcacgggggtcagggacccacttgaggaggcagtctgtccctcagcagagctcaagtgccgtgctgggagatccgctgctgtcttcagagcaggcaggcaggaacatttaagtctgctgaagctgcacccacagccgctccttcccccaggtgctctgccccagggagatgggagtttcgtctataagcccctgactggggctgctacctttctttcagagatgccgtgcccagagaggaggaatctagaaaagcagtctggctacagcagctttgatgagctgcagtgggctctgcccagttcgaacttcccagtggctttgtttacactgtgaggggaaaacccctactcaagcctcagtaatggcagacgcccctccccccactaagctccagcgtcccaggtccacttcagactgctgtgctggcagcgagaatttcaagccagtggatcttagcttactgggctctgtgggggtgggatctgctaatctagaccacttggctctctagcttcagccccctttccaggggagtgaatggttctctcttgctggcattccaggtgccactggggtatgaaaaaaagctcctgcagctagctcggtgtctgcccaaacagctgcccagttttgtccttgaaacccagggccctggtggtgtaggtacctgaggaatctcctggtctgcaggttgcgaagaccatgggaaaagtgtagtatctgggctagagggcaccatccctcacggcacagtccttcacggcttccctcggctaggggagggagttccttgaccccttgtgcttcctgggtgaggcgacaccccagcttgcttgggctcactccccatgggctgcacccattgtctaaccagtcccagtgagatgagccaggtacctcagttggaaatggagaaatcacccacctgcgttgatctcgctgggagctgcagactggagctgttccttttcggccatcttgcccacgaccccagaaacattttaatcataactatatttctattccagaacccagcatgtaactcttgttagacctgtgaggacagtttcaggctgagagcccaatcccataggactgccccctgcatttcacatgccagtcacaagtattaatagtatgttgtcacttatacttctgactaactggctcttagtcacggattcccatgatctccatctggagtttgattaatttgctagggtggctcacagaactcaggtaaacactttacttatagttccccatttattataaaggattttacaaagaatccagatggacagccaggtggaaggggcttgtagcttccacgtcctttcctggcgtgccactcaccaggaacctccacgtgttcagcttctgtaagctctccaaaccctgtccttttgagtttttacagaggtttcataatgtagccataattaaatcattggccactggtgatcatctcaaacttcaggccctctcctgtcccccgaagtggaggatggggctgtgagtgccaacccattaatcacatggttgggtcccctggcaaccagtcacccatccagtggttatctagggactctccaaaaaccacctcattaacaaactcaagtgtggtcaaaaggggattgttataaataacaaaagacatgttcaccttacaactctggagctattctaaaactatttcagatccgaggacgaaaggtcaaatattttaacaaaagacaatcctactgctctagtcactcaggaaattacaagagttatgagccaggaactgtggacaaaatcaaaatatatattccataatattacgccttgaaacaaatgaaaacatagagaatctcagcaaaaaatagaaccaaacagcaattatagaacttagaaatactacaatcaaaataaaaactcactggatgggttcaacagtagagtagagatgacaggaatagaatctgtgaacttgagggtaagtcagtagcatatacacaatctgaacaatgaagagaaaatagactgaaaaaaaagaacagagcctcagatatctctgagacaatcacaaaagatccaacattcatatcattaaagtccagaaaataagggagaaagaacatggagagataaagaatgcaaagaaataatgctgaaaatttcctgtaggccaagcacggtggctcacgcctataatcccagcacgatgggaggccagggctggctgatcacttaaggccgggagttcaagaccagactgagcaacatggcaaaaccttatctctacaaaaaatacaaaaactcgcctggcatggtggtgtgtgcatgtagtcccagctacttgggggggctgaggcagaaggattgcttgaaactggtaggtcgaggctccagtgagccaagatcaaaccactgcgttccagcctgggtgacaaagtaagaccctgtctcaaaagacaaaaaaaaaaaaaacaaaaaaaaaagaaaaagaaaattttcagccgggcacagtggctcacgtctgtaatcccagcactttgggaggccgagggaggtggatcacctgaggtcaggagtttgagaccagcctggccaacatagtgaaacctgtctctactgaaaatacataaattagccaggcatggtggcatgtgcctgcagtcccagctacttgggaggctgagccaggagaatcgcttgaacccaggaggcagaggttgcagtgagccgagatcataccactgcactccagcctgggcgacagagtgagattccctctcaaaaaaaaaaaaaaagaaagaaaaaaaagaaaagaaagaaagaagaagaaaattttccaaaggtgtcaaaaaacataaaattgcagatccaagcagctcagcatacttcaaataaaatccacctagcataacctacaccaagacatatcataattaaatttctgaacactgaagacaaaggtcacagctggagagaagcaaaacatggcctgtaaaggaaccccaatgtgaagaacaggttcctcatcagaaaccgtggagtccagaaggaagtgacatatcttccaaatgctgcaagaaagacctcccaatcataaatcttatatagatggtgaaactattcttcaggaatgtaaggggaaaaaagacagtctcaggcatagagaaactaagagaagttgttgatagcagacctacctttaaagaattgctaacaaaatccctcaaaacagaaagacaatgataataaaaggctgggattttcagccttttattattccatttcagtaaaaatagaagtaaatattcaacatccattcattagtttctttgatcgtatttatggttgaagcaaaagttatacattttctgatatgtatgtagaggttatacctaggacaattatatttttgtaggtgtggaggataaaggaattaaaaggaagtaagctttctacccttcaatggaaatggtaagacattgacaccagtaagctgtgataatttacatatgaatagaatagtagctagaacgaccactacaaaaactatacaaaatggtatactaaaaatatatataaataaatcaaagtggaactctaaaaaacattcaagtaacccacgagaaggcagaaggaagataaccaggtaacaagaaacagggaacaaatggtaaacaaattaaactctaacaggtcaataatcactttaaatgtaaacggactaaatacattaattaagagacaggattgcaatgggtacaaagttataattagaaaggaagaataagttctgatgtcctattgcacagtagagtatctcaaaatagctagaaaagaggattttgtatgtgcctgtaacaaataaataataaatgaggtgatagatatgctaattaccctgatttgatcatcacacaatatatttatgtatcaaaacatcacattgtactccataaatacatacaattattatgtgtaaaaaatttttaaattaaaaatgagacaagattagctgagtagatttaaaaacattacccaatgttatgctgtctataaaaaactcaattcaaacataatgatatagctaagtaaaaagtaaaagcatagaaaaagatatatcacataagtattaaattttaaaaaggaagagtggctatatgaatatcaaggtagacttcagagcaaagaaattaccagacacggagaggaattttacatgatgataaaagatcaagatcaatctaccaacaagagatagcaaacctaagtgtgtatgcaccaaaaacagatctttcaaatacatgaagcaaaaactgataaagccaaaggaagaaattgacaaatctactattatagttggagacttcaacactcttttctcagtaattgatagaactactagatagaaaatccacaaggagccaggcgtgatagctcatgcctgtaatcccagcactttgggaggccaaggcaggagaattacctgaggcctgaagtttgagaccagcctgggaaacttaatgagaccctgtctttacaaaataataataattattttatttttggctatcaatcatgccacattatttttaattacatacaaagatctaacatgccatccagggaccattttacccactgctttgattggttgccaatctcttgtctctctcttcagcaatggtgaggcagataccttttccttggggaagagaaatccatggtatgttgcccttgcaaacaacaaaaatgttggaaagtcaagtggcaaagctgttgccattggcatctttcatgtgaaccacgtcaagagatccagggtgcctctctctgttggtgatcacaccaattcttcccaggttggcacctccagtcaccatacacaggttaccagtgtcgaacctgatgaagtcagtaatcttgccagtctccaaatcaatctgaatggtgtcattcaccttgatgaggggatcagggtagcagatggtacgagcatcatgagtcaccagatgagggattccttttgtgcgcacaaatattttttctcacttttcacaacttgtacttggcctcctcaggtgtaatacgatgtacagcaaagtgacccttggtgtcacagatcagacagaaattctctcccatcttgtcaatgctgatgacatccatgaatccagcagggtaggttatatcagtgcggaccttgccatcgatcttaatgaaccgctgcatgcaaatcttctttacttcctctcctgtcagggcatacttaagtctgttccttatgaaaatgatgagggggagacactctctcaacttgtggggactggtggatggatgaggagcaaacacaccagtcaatttatccagcatccaatgctttggagctgctacctgctttagatgcttcttgggaccacgagccatggctacgttaggcacagaaaaagaaaaaataacaattttaaaaattagccaggcatagtggcacaagcctgtagtcctaactactcaggaggctgaggcaggaggattacttgaacccaggagtttgaggctgtagtgagctatgactgcaccactgcactccagcctggacaacagagatagaccctgtctctaaaaaaataaaaaagaaaataatgaggatatagaagaattgaacaacaccttcaaccaacaggatctaacagaacaaacaaccctataacagcagaatacatgtgcttttcaagtgcctagggagcattcaccaagattaaccatgtcctggattttaaaccaatctcaacaaatgctaaaaaaaaataataaaactagaaatccctaatcactgccctcttttccaagctgcctgtgactcttacccagatgttctcaatacataagctttcaacaggggagaatgatagaaattactggagaacccccattccaggtcactgaggcacatgaccttctactaaagaaataatttccagtaaaaggatacaataaagggaatagatgttcccactaggcctggattaatgagtactctatcttggagaaaagtgattatttccagagctgcctctggcattcttcctccacccagaagtgatgctgtgagaagtgaaattacttataaatcagtagtgcccaaagcactttataaaggaggtcccacatgtaagctccaccaagtataaataataacactaataacacctccctcatcttgtctttatatctgggtcttggaggatcaaagccatccgagaggtacagcttcaaaggcgtctccttcccagatccaggaatgggcgcactccaacaggcccctacatccttggcttccacatttcacaactgttagaggctccaaagcatttacagtggttgatagagtctttctgaatatgatacctcttttataaaattaatggcactatttccggtggtggcatcagcaaagaaactccttttcaagggcagcgtgtccctcccattgtttgattttctgccatccctttaagtgccttaatggaatgcttgtacgaataaagttgactgccaacaaattttgctttgaatatcttttacatttcaaggcacccctggaaataatcggagactatgggagacatggaattagggagctgtgggaaagcagggttgacagtgtcatctcaagatttggtggacttcattattcagtggccagaagtagggaggaggggagtctggggcctgagaagagggttgccctgatgggctggtactggctctggagtcactgactgtgccagggaccagatgcctgcagaagcatggttcagcgttatacctgcagggagacgaatcacccaagagtgtctaaaaccatcctcatagggatttgtggaacttcaaacttgagagagatgatttcgggtatctggtggaagaaatttctaagcagcaaagcattcaagaggaagcagagcatggaaatttggaaaatttgcagcctgaacatggaatagaaaagaaaaacccattttctggggagaaatttaagcctgctgcagaaatttgcataagtaacgaggagccaaattttaacctccaaaacaatggggtaaggtctccacggtatgtcaaaaaccttcatggcagcccctcccatcacaggtccagaggcctaggagggagaaatggtttcctgggctgggctcagggacccctgctgtgtgcaaaatagggacttggtgccctgcatcccagctgcttcagctgtggctaaaaggggccagagtacagctcagtctgtagctttagagggtgtaagcccaagccttggcagcttccacatagtgttgagcctgcaggtacacagaagtcaagaattgaggtttgggaacctctgcctagatttcagaggatgtatggaaatgccaggatgttcaggcagaagtttgctgcagtggtggagtcctcatggagaacctctgctagggtagtgagggagggaaatgtggggtcagagcctccacacagagtccttaatagggcactgtctagtggagctgtgagaagagagccaccatcatccagactccagaatggtagatccaccaacagcttgcaccatgtacctggaaaagccacagaaatgcagtgccagtttgtgaaaacagccaggagtaggggacagtaccctgcaaagccacagaggtggagctgcccaaggctgtgggaacttacctcttgcatcagtgtgacctggatgtgagacatggagtcaaaggagatcatttgggagctttaaggtttaatgactgccctattggatttcagatttgcatggtgtctgtagccccttagttttggccaattcctctcatttggaatgggtatatttacccagtgcctgtacccccattgtatctaggatgtaactaacttgttttgattttacaggctcataggaggaagaaacttgccttgtctcagatgagactttggatttggacttttgggttaattctggaaaaagctaagactttagggtactgttggaaaggcatgattgtgttttaaaatgtgaggacataagatttgggaggggccaggggtggaatgatatggtttggctttgtccccactcaaatctcatcttgaatagtagttcccataatccccatgtgttgtgggagggatgcagtgagaggtaatcgaatcatcggggtggtttctcccatgctgttcttgtgatagtaagtgagttctcacaagatctagtggttttataaggaccatcccttgtaagggttttccccctttgttcagcacttctccttcgtgcctcatgtgaagaaggatatgtttgcttccccatccaccatgatcgtaagcttcctgaggtctccccagccctgcagagccatgagacaattaaacctctttcttttataataataataataataaaaccatcctcatagggttaacaagaatttagatgccaggtttggggcagaaatatagttataattaagcattaatcaggctgcactctggcccacttccttaaactgaaagtcatgcagctcaagatactgactgtttaaatcccattttccccatagataggacttctgatgttagaatcattaggcttttgtttaagaattgctcaagatattcttcatatcctgaattccatcaggaaaggctgatgccaatgagtttgaagaccccacgaggaaccaaatcagcatgagaatgcagtttcttcatctccctgtcctatgacttcaccctgcactcttccaccaatcaacaatccccacatctcagccctttccaaagcccttaatatccgtagctccaaattccttaggttggtggatttgaggtttcttcccacctcctcatttagctctcctatgattattagactttttctctgcagcaatcccccttgtcttgttatattgacttgccaggcattgggcaaacgatcctgttacatatccactgagccatatgtggaagcctcggccagtgccagtcaatatcaaggaatttggtccatttctagataagaatttggggttgttgattagttgggataaggggaaggaaatcatcaggatgtggaaactgcattctttggtgactcagctcctgtgaggtccttaagaccagctggcatcagtagtttcattggtatgcagaaactgaaagagtatctcaaatggaaaagttaatgttttataatgttgaagttgttatctatagagcagctaaggggaaggatcatctcgtaacagggttcatgtaatcctgagtcgataggccccagacagctgtgaggaagtggatcagagagcaagcggacctcatggtcaatgctgagtgtgctgcaagcttggtttatcttcatttctcccccttccttctttcctgattaattttataaagtctatagggacagtttcaccacttagatgttcccatccctcctctgctgtcatctctctaggctggaaccccattgtgcatgggctcagcataccctttggccagataatgggaatggtggtctgttcccacctgctcccacctctgtagcgacttttctctagcaattaacccctctctttcctgtgccatcaactgtccccataaaccaactcctccccagcattcaaacatctcccccatcttaaaaaaacaaaactgatcttgattcccattctggaagcggccccttcccctcctccccaaataactaaacttacttaagagtgccctgcatccagcctgcattccctcctcacccagcagagctgcacctgtggaaagcaggctgcagctctcgtgttccaccgcaccctgctgcggccctgtccacagaccatctgattggcacccgacagtgtacataccccaggactcattaccctcctccttgaaacttcctctgctgcgttcgttgctgccatgttttgtgttcttcctgcctctctggtttcttcttcagatgcatggctggtttcctctctgcgcatgagcttcagtcctgctctctctctcttttcttttgctccttagcagtactttatccctgggttccaagtgtcaccaatgtgctgacaaccactgggcttaaatttccagtgcagccaatcccctgagctctgaacgcatcctgccgactgcctgcctcgcatcttccactggaaaatggcacttctctccacgtgagtgtgaacctacactcctaccttccctcacccctgcacccaaaccctcagcaacccctgcacctgctccctctgaaatctcctctgccagcggcttctccttacatccactgtcactactcatgtccagagcaccggcatctctccctcgacctccacaagcctcccagcttccactcctgccttctccaaaccccacacagcccttgagccacccatggtcatcatgtctctttcttgcccgaagtcttcagtggatttccactggctttcactgagagctctaagtcctgaacatgacctccgaggcctggcatctgctgccatgggccccctttcttgctgttctcatgtccttacccctttgtcactgtgtccagccacactgacctcctttcaattccctgaactcacagagccctttctcctggtcaggacggtgctccctctgctccctctgcttggagcagcctccctcccattctctggccagctcacaccaactcctctctaggtcagtgccataaatacccatccccagggaggccttccctccaccccagcatgcatctcaccttccattgtgatctcttgtcacacctcagcttctccctctcagcatgtattacattttgcattctgaaatgttcatttgtgtgaatcattgtttaatatctatttcttccacttaacaacaacctaagggcaggggtgatcctgtctgttttcaccatgactataaccccctagctttcagaatagaaataggcacagagtaggggttcaataaatttttttgaatgagtactaagtattctgcagtaacagataaacacacagacacacagatgcttattaaatacaaaagcctgattgcctgttgtagctgttggtgacccacccaatctctttcactgttctggagtccgcatcctcccagctgctgtgtgtatcggcttcaaatgtctcacagctgccctgcttctttggggagctgccctcagcagaggagagctgcctggctggcaaccctcagcgccatggatggcaggcctgccccttgcctcccggtagggtcagcaggacagggaaggggaaggcagccctgcagtgctgttcatgctccagggttccctatcagtaggctgacgctagacatgcctaagcccacttctctccctctcgtgctcccataaccagtatttcttgagagttctcccaccgtaagccacttgaacaagaaactctgaagtggggcatggtggctcgtgcctgtaatcccagcaatttgggaggctgagatcatttgagtggatcgtttgagcccaagagttggagaccagcctaggcaacatagtgagacccctgtctctacaaaaaaaattttaaaaattaggtgggcatagtggcacatgcttgtagtcccagctacttgggaggttgaggtgggggatcacttaagcccagaaggtcaaagctgcagtgaaccatgatcatgccactgtacgtcagcctgcaacagagtgagactctttattaaaagaaagagagagaagagagacacagagagagagaatcaagaaagcaagagagaaagaagagaagagaagagaaaagaagggagggagagaggaaggaaggaaggaaggaaaaagaaactatgtcccaggttctgcttctaggaagtccagtaaaaaacacttataatggggaagaaaatatatgtggcatcagggatgagagggagaaattaaacgaaacaaaatgagagaaaagtcttgtaccagcgcatgtgcctaagaattgaggtgaatgagtcaaatctcgcatcttttatccttccttggaattattgaattaataaatgggagaagagaaagaaggagtggaagagaggagagcagagtggaggacagcagaggatttctcttttagtgcccctaggaggtcatgatgtgtcccatgaagccagaaggggtctgctggtccccaatcccttaatggaatctcagccgcttctaaaggaggaaaaatgaacattagttccctaagcctcctttgccttggagccaaccagcatgccctgtgttctacaacataatcctttgctaatcactagctagggcactaggtaaagcagtttttcaaatcctggctggagctcatggcatttgagatatacaaatatgttgccatggtgacacactgacagattaattactgaaacctccaggagtaaagctgctttaatggtgtaaccttagtggataggagcttgtgggggggtgggggggtgggggcgtgtagtgattcacagccctctcagcacaaagttggggccagcagatctggggctagaggtaggtggagcagccacaacccttacctcacaccaacatttcctggagccctgggcttcctgagtctgtcctgcctctagaaatggaatctctaaccccaaagcttgtccttgaaaaatacctgcatcatccttttatccacgcctttgccagtcattatgcagcctgcatctctgcatgattaatgagcaaatcctcacagccactcccacttcccccaccactaagctcttcttagctggaaaatcctctgaagctattggctagcagggctctgcccaacaagagtattaatgttaggcatatgattcctcaaaggaagagagaagaaaaatattcggggacaaacacaatggatgcagatctcatcagggaacccaaggtagaatctagcccacatttttaagttaacaagattagaaaattatgtaattctcacaaataagcttgtcccttaaaatccacaatagacttttacaaattcaggtgggttctttggcccaggctggagtgaaatggcataatcttggctcactgcaacctccacccactgggttcaaacgattctcctgcctcagcctcccgggtagctgtgattacaggcatgcaccaccatgcccagctaatttttgtatttttagtagagatggggttttgccatgttggccagactggtctctaacacctgacctcaggtgatccgcctgcctcggcctcctgaagtgctgggattacaggcatgagccaccttgcctggcctcaggtgggttcttatatgagccttggtggctctcatttctcccaaatgatgagctgagatgaaggcatatatatctttgactggttatggagttgagatattcacagtaagtttgcaataataacagaagcgactattaccacacctcagtggaaacggagttttccaaaaagccacaatttcagataaacctgactctaagtgggaaaagaaataagacattaaaggagatatttcgaagctttagaaaggcattcgaaaagtttttgagcccatctaacaagcatctctttgtgttttgtctcctttctctaatatttaaatgtaattttgatgtctgccagattaaattatccattgaccaatttatgtcattaaacttaaatgctataattatccttaataagtataactactagcctgtttttgcttaatggttgtaaagttttatgccttttaataatcctcctacaggtttgaagtttgtgtttctcagatagctgaaattctgctctgcatagtgtcaaaccagatcaaagagtctcgctttgttcacgagaacaatatgagcttgaaaatgcggggttggaagaaaaaacacaccagaaaatgatgttctttcaagaaaactggcaaaccaagaaaatcctacacaaattttgcaaaaagaaggctaatctagaatacgtttttctctacatacacagttcaagtgcaattaaaaaaagaatttttttcagcattaagtttatataaaatgggccctctttttattccatgtgcttcataatcttctttctcagggatatttagagttggatttttgcagatgatgccctgttctcttcatgtcacagcatgcgtttttgttttttgttttgagagccagggtctgcccaggcgcggtgattcatgtctgtaatcccagcactttgggagtccaaggtgggtggattgcttaagctcaggagttcaagaccagcctgggcaacatggcaaaacctcatctctactaaaaatccaaaaattagccaggcatggtggtgcacgcctcccagctactctggtggctgaggcaggagaattgtttgaatccgggaggtggaggctacagtgagccaagatcgcaccatttcaccccagcctgagcaacagagtgagaccctgtctcaaaaaataaataaaataaaatagggagttggggtctggctctgtcacccaggccagagtacagtaatgcaatcatagctcacagcagcctcaaattcctgggctcaagcaatcttcctgcctcagcctctcctgtagcttgcattacaggcatgagccatctcacccagaaaacaacatacacttttcattccagattttacatctctccactctgggttatttttttgctttggttctatctattgaggtgtcttattttcaactaagtgttgtgtttaggaacttctttttgtgggtgaatgtttatactaactcccatccttaacccagagtgggattaagacttttttcttcttttttttccccttacttatatggcatcaaaaacaaaagcaaaaataaatcttggagtagtacagagaaacctgattccaaaaggtcatcataccagcctgggtaacacagcaaagctctgcctccacgacaaatacaaaaattagctaggtgtggaggtacacacctgtagtcctagctctctgggaggctgaggtgggagaatcgtttgagtctaggagtttgagggtgcagtgagctatgatcagaccactgcactccagcctaggcaacagagtaagaccctgtctcatacaaaaacaaaaaagattattgtaaaggtgaaggaaactggctattacaataggaagaactctctaaccataagatctgcaaatgtctcaagagttaagcaaaaaggggttttcttttatagggaagagaaaatgaggctagaaagtggggtaaatggaagtgtcatgatcagaaaacagatcagcagccgggcacggtgggtggctcacgcttataatcccagcagtttgggaggccaaggcaggcagatcacttgaggccaggagtttgagactagcctgaccaacatggtgaaaccctgtctctactaagaatacaaaaaaattagccggccatggtgatgggcctctgtaatcccagctacttcagaggctgaggcaggagaatcgcttgaatccgggaggtggaggctgcagtgagccaagatcatgccactgcactccagcctggacgacacagtgagactccatctcaaaaaaaaaaaaaaaaaaaaaggaaaagaaagaaaagaaaaaagagagtagatcagagaaggttgcaccccaggtgggcctaggctcaggaggggctgctgaggaagagcttgttctggcccaggctgagagtgggccaagttcagggccctggggaaaggagattttgattaagaagggttttgttttgtttgatcaatagggacctgctgctcagccaatcatttatgaggtaaagaacaggaatttggcaggttcgtatctggctttttctaggtaaacaagggcaggggtcccaagcccctgggccacggaccagtaccagtctgtggcctgttaggaaccgggccccacagcaggaggtgagcagcgggccagccagcactaccaccgagctccacctcctgtcaggactttaacttctcacaggaccacgagccctattgtgaactgtgcatgggagggatctaggttgcacactccttatgagaatctaactaatgcctgatgacctgaggtagagcagtttcatctggaaaccactgcccccacccatctgtggaaaagttttcttccatgaaactggtccctggtgccaaaaaggttgagaactgttgaactaaggggcatccatgactcttatctatgttatatgtggaaggggggggggttcatcttcgcagtacatgccttttgtttcccagaacacaaaagtagggggatttcttaaccctcactcttttccaagagttacagggtactcttaggtaaggtttagtgttgtcagtgaccacattcaagaccagacttcaagaggcccagaacacattatgtgatggtttgctggtctagaagcaaaagagagcatctatgttggcagaaagagtgaacagggttgtcctatctggggcatcagcctttactcatgcctcttctgcctcctccgtagttccacagaagcaacaatgagctacctgtgaactggagaaaactgacaatctagattctttccattctgcagcctactttctataaccttattagttcataacacaataatctcattttagaatttcatttatctctcattagtcactgctttcagaaaatagcaatttacctgtctataaaaataatgcatttttatcattgactatgtagacataatgggaaggataacatcagcaagatggccaagtaggaagccctggactctccttctcccagtggacacagctcaacaacggtgcatggacaaattcccttttcgaggaattcagaaactcattgagaagctcctgcgccctgcatgaacatgaaaccagccgcattgaagccagtaggaaaattcaaaacacactctcattgtaatccctaccccaacacatcaccataccatcagaaggaaaccatctgttcccagcttctccctaggagaagagttgaagcaggtacccagccttccaacttttccaggggctgctcaagggatagatttctgtctcttctgtcttagagcactgatgagacctagtaaaatcaagatgctttgggggcctctaagaacaaagcacaaaggtttgagaggcccccaaaatctctgggcagactgactgatgaggatttcctcctgcataagttcagtcgtgaaggtagggaaaggtggctgcattttctaatgcatagatactgacacaaaaactcaaggaaaatgaagaaacagggaaatatattcggaacaaagcaacaggataaatctccggaaacagtctcaatacgatggagattcaagcacgcctcattttattgcactttattgcattttgcagacactgtgtgtgttttttgtttgttcgtttgtttacaaattgaaaaaaaaaaaaagactctgcattaagcaagtctagcaatgccattttcccaacagcatgtgctcacataatgtctctgtgtcacattttggtaattcttacactatttcaaacattgtcattattcttatgtttttcatggtgatctgtgagtgataatctttgatgttactgttgtaattgttttggggtaccacaaaccatacccacataagatggcaagtttaattgataaatattgtgtgtgttctgactgctccactgaccagccattctcccatctatctccctctactggggcgtccctactccctgagacacaacaatattgaaattaggccaattaataatcctacaatggcctctaaatgtccaagtgaaaggaagagtcccacatttctcactttaagtcaaaatctagaaatgatcaagcttagtgaggaaaggatgacaaaaaccaagacaggctgaaagctaggcctcttgtgccaaacagtcagccaagttgtgaatgtacaggaaaagttcttaaagcatattaaaagtgctactccggtaaatatataaatgataataaagcaaagcagccttattgctgatatggtgaacgtttgagtggtccagatagaagatcaaagcaggaaaaacattcccttaagccacagcctaatctagagcaaaatccaaactctcttgaattctttgcaggttcagagaggtaaggaagttgcagaagaaaagttggaagctaacagaggttggttaatgaggtttaagtaggaaaactgtctctgtaacataaaagtgcaaggtgaaacagtaagtgttgatgtagaagctgcctcaagttatccagaagataattaagataattgatgaagatggctacactaaacaacagattttcaatgtagatgaaaaagctttctattggaagaagataccatctaggactttaacagctaaagaggagaaagccaatgcctggcttcaaagtttcaaaggatgggctggactcttgttatggactaatgcagctagcgactataagttgaaagcaatgcttatttactattctgaaactcctagagcccttaagaattatgccaaatctactctgcctgtgctctaaaaatggaacagcaaagactggatgacagcacgtctgtttacagcatggtttactgaatatttaagcccacagttgagacgtactattcagaaaaagagattgttttaagtattactcctcagtggcaatgttcctggtcaaccaagagctctgatacagatgtacaaagaaagtaatgttgttttcatcctgctaacacaacattcattcttcagcccatggatcaaggagcaatttcaactttcaagacttattatttaagaaacatattttgtaagactatagctgccatagatattgattcctctaatggatctgtgcgaactaaatagaaaatcttctggaaagaattcaccattctagatgccattaagaagatttgtgatttatgggagaaaatcaaaatagcaacattaactggagtttggtaggatttgattccaaccctcatggatgactttgagtgtatatctgtcctttcccacattgctgtaaagaaatacctgagactgggtagtttataaagagatttaattggcttatgattctaaaggctgtacaggaagcatagtggcttctgcttcttcaggaggactcaggaagcttccaatcatggtggaaggcaaagggggagtgaggcagttcatatggctggagtaggaggaagagagaaagtggggaggtgccacatgcttttaaacaaccagatctcatgagaactctatcatgaggacagtactagggggatggtgctaaaccattagaaaccatccccatgattcaatcacctcccatgagtccccacctcccatcaggcctcacctccagcatttggggattatatttcaatatgaaatttgggtggggacacagattcaaactgtatcattctgcccctggcccctcccaagtctcatgtccttttcacatttcaaaacacaatcatctcttctcaacagtcccctaaagtcttaactcattccagcattaactcaaaagtccatagtccaaagtctcatctgagacaaggctagcctcttccacctataagcctgtaaaataaaaacaagttagttacttccaagatacagtggtgatataggcactgggtaaatactccattccaaaagacttgcccccatgattcaattacctcccaccaggtccctcccacaacatgtgggaattcaagatgagatttgggttgggacacagccaaaccatattgttcactcctgacccctcccaaatctcatgccctcacatttcaaaactaatcatgccttcccaacagtccccccaaatcttaactcatttcagcattaactcaaaagtccacagtccaaagtctcatccgagacaaggcaactcccttctgcctatgagcttgtaaaatcgaagcaagttagttacttcctagatgcaatgaggttacaggcattgggtgaatacagccattccaaataaaagaaaatggcccaaagcccccatacaagcccaaaacccagcagggcagtcataaaatcttaaagctccaaaataatctccttttactccatgtctcatgtccagagcactctgatgcaaggggtgggttctcaaggccttgggaagctccacccctctggatttctaggggtcagctcctgcgactgctctcatgggctggcgttgcatgcctgtggctttttcaggttcagggtgtaagctaagattggatctaccattctggggtctagaggatagtggccctcttctcacagctccactaggcagtgccccagtggggactttgtgtggaagctccaaccccacatttcccctctgcactgccctagcagatgttatccatgagggctccacccctgcagcaggcttctgcttggacatccaggtttttccatacatcctctgaagtctaggtggaggctcccaagcctcaactcttgcactctgagcacccacaggcttaacaccacatggaaggtgccaagacttatggcttgcactctctgaagcagcagcccaagctgtacctgggccactttaagccatggttagaggtggggcaattgggacacagggagcagtgtcccaaggctgcaaggggtggcagggcccaggcttggctcacaaaaccatttttcccttctagacctctgggcctgtgatgggagcagctgcacaaagttctctgaaatgccttggaggacttttttaaattgtcttggatattagcacttggatcctctttacttatgcaaatttctgcagcctgcttgaattccttccctgaaaaaaatgggcttttcttttctaccacacggccaggctgcaaattttccaaatttttatgctctggtttcccttttaaatacacacgtggttgtgcatgcctgtaatcccagctatgcaggagcctgaggcgggagaatcacgtgaacccaggaggtggtggttgcagtgaaccgagatcatgccactgcactccagcctggcaacagaatgagaccccatctcaaaaaaagaaaaaaaaaaaaaagaagaagtgtagcctgaaaatgtgactaaattgctgcaacctcatgatcaaacttgaatagatgaggagttacttcttacagataagcaaagaaagcagtcaatccacactaagacatattctatagatgctcattgagttatgatggggttacatcctgataaatccatcagaagttgaaaatatcaccagtcaaaaatgcatttattgctggaaacactgcagacagtctttgattatgatggctcaacttatgattttttgatgagccagagcaattacttagtcaagaaaaagaaacaaaaggcacccaaaactatctctgaaaataatatgacttttttttttcttcagatagagtcttgctctgtcatccaggctggagtgcagtggtgtaatctcggctcattgcaacgtctgcctcccaggttcaagcggttctgctgcctcagcctcctgagtagctgggattacaggtgcatgccacgaagctcagataatttttgtatttctagtagagacagggtttggccgagttggccagtctggtcttgaactcctgacttcagatgattcgcccaccttggcctcccaaagtgctgggattacaggcatgagccaccacacctggcaacatgatcttatatatagaaaactctaatgcgtccatgaaaaaaactcttagaataaaccaattcagtaaagttgcagggtataaaatcaacatgtaaaaatcaattgtatttctgtacactaacaataaactacctgaaaaggaaaccaaaaaaaatcccatttatagtagcatcaaaaagataaattacttatgaataaccttaacaaaagaggtgaaagacttgtacactgactattgcaatacactgatgaaataaattaatgaagacacaaatagatgaaaagacattctgtgtttataaagtgaaagaattagtattgttgagattcccacagtacacaaatgatctacagattcaatgcaatttctttcaaaatcccaatggcattttttatagttgaagaaaaaaaaatcctgaaattggtatggaaccacaaagaaccccaaatagccagtacaatcttgagcaaaaagaaaagagctagagacatcacaacctcctggtttcaaaatacattgcaaagctacagtaattaaaacagtatggtactggcataaagacagacatatagatcaataaaacagaatagagaacccagaaataaatgcaggcatatatggtcaactgatctttgacagggtgccaagaatacacagtagagaaagaatagtcagttcaacaaatggtattgtgaaaaccagatatccttgtgcaaaaaaaaaaagaaactggacccttatcttacaccacacacaaaatcagctaaaatgaattaaatacctgaaattttaaaatttctagaataaaacatatagaaaaagctttatgatatagttctggcaatgatttattggttatgacatcaaaggtgcaggcaacaaaagcaaaaatagataattgggactatatcaaactaaaaagcttttgcaaagcaaaggaaataactgggtgaaaagacaacctatgggataagaaaaaatatttgcaaaccatatctgataaggagtttaaaactataatacaattgacccttgaaaaatatggctttgaactgtgtgggtccacttatacgcagatttttttcaaccaaatgtggataaaaaatacaatatttgggggaagcaaaacctgtgtatacagagggatgacttttcatatacatgagttccacagggccaaatgcagaacttgagtatgcatgaattttagtatacacaggggatcctagagccaactccctgcacataccaatgacaaccatacataaggaatttctacaactcaatagcaaaaaaaaaaaaaaaaaaaaaaaaaagacgtgatttaaaaatgggcaaaggacttgaatagacatttctccaaagaagacatagaaatggcaggtatatgaaaagatgctcaacattactttagggaatctttaggaaaatgcaaatcaaaaccacaatgaggtatcacctcacacctgttagaatggctacgatcaaaaagtcaaaagatcgcaagtgttggtgaggatgtagagaaattggaacccttgtactctgttgacaggaatgtaaactggtacagtcattatggaaaacagtttggagattcttcaaaaaattaaaaatagaactgcttctaagtatatatccaatcaattgaaaaccagattgcaaagagatatctgcactcccatgtattattcataatagccaagaaagagaaacaatgtaagtatccattagcagatgaatggataaagaaaatgtgatatatacagtacctacaatggaatattattcagcctttaaaaaggaagaaattgggcctggagcagtggctcatgcctgtaatcccagcactttgggaggccaaggtgggtggatcacttgaggtcaggagtttgagaccagcctggccaacacggtgaaaccccatctctactaaaaatccaaaaaaaaaaaaattagctgtgcctggcggtgggcgcctgtaatcccagctactcaggggtaatgtggtgttgctattcaatgggtataaagttcagttatgcaagatgaataagttttagagatctgctgtacaacattgtgcatatagttaacaatactgtattgtacgctaagaatctgttaagagggtagacctcatgttaaacattctaaccacaataaaaagaaaaaagaatttagaaattcaaaaaagtaatctaagttccacaaagtagaaggtaaccaaagttaacatttagataccttttctcttaagactttttcaaatgcacaaatctgtatgtgtacttttttcattgtatatttcttactagttatcacagtatattttattgatgttttgttgttgttgctactgttgctactatttgcatatgtggtttttgtttctgtttttgttttttgagacaagatctcactctgtcacccaggctgaagtgcagtggtgccatctcagctcactgcagcctcgagctcctgggctcaagtggttctcctgtttcaaccctctgagtagctgggactacaggcacacactaccatgctcagctaatttttgtggagacagggtctcactatgttgcccaggctggtctcaaactcctgggctcaagtgatccacttgccttggcctcccaaagtgttgggattggaggcatgagccactgtgcccggctgcgaatgtgtttcttaatagccacctgtcaatgcctatcagttaaagacctccaaggagttgaacaaattgggtttgctgctcattgtaatcaagaaaaatacacacctcagggaactctagggtgtcttagtaggaggatgttataaaagaattagaggattggggcttgtattagctgattttgagaagggttccagggagcaaggctgtgctctgaattggctactgtctggaaacaggggcagctctatgattgggtatctgaatcgctggtatttagaattagaaggcaggaagaataaagtgaagtaaagaagcagaatcacaactcagcctggacaaggcacgtttggtcacttttaatgtcttcttttgggttcagacatgattacagagaaatttgggttttgtcctgatccatcagtgagataaagtggccttgattgatgtttgtgttctgcttaagtgtttatgttcaacaggagatgacagcagcccggtggtaatgcctgttctcagctgtcaggggccacttctcatgccttactgaactctcttagtttgtaattgattctcttggacttctagttatgattttttaaaaatatgtcacaaattttatataatttctctcttttctctattcctcttattcttctataattttatactggaatttctagaacactatcaaagtataaaaatggtagaaggccttgatcctatttcttactttaattggaatgcctgtagtatttttatcattaaatatcagattggctgtttgggacgataatgatgtctgaagaggcttttcttcagtatactaaataaagatccttcctgttagtgtattcagaaatgactgttcaatttttttcaaatgttgttttgtatctatgaagataatcatatgcttttctccttttctattctgatgtgatgaaccatactaatggatttcctattattcaaatatccttgcactttcggaatgccaatttgaatttttcctgaatgagcatctgagtctgaagtactgcatttattcacaagtgagacttgtttctaaattttgtgatgtcaacttggctgtgttttagcatcagtgcacctctagtttcacaaaacaaattgggagattcacagcatttttatgcacctggaaacaagttacacagaataagaactgcctatccctttaaagcaacactgacccatagaactttctgaagtgacagaaatgctctatatctctcttctccaatatggcaaccactagccatatgtggttactgagcacttcaaaagtggctagtgaaactgaagaagagaattttccattttatttaattttaattaatgcaataacctatgaaaccatgtgtccaacatctttcttgatgtaatttcctaacaactgtttccatttcttctatggttattattctgactttctttttttttcttttctttttcagacaaggtcttgctctgttgcccaggctggagtgcagtggcacgatcttggatcactgcaacctccacctcccaggctcaagcaatcctcccacctcagcctccagcgtagctgggactacaggtgggcaccacgcctggctactttttgtatttttagtaaaatgaggtttcaccatgttgcccaggctggtctcaaactcctgggctcaagtgatctgctcaccttggcctcccaaagtgctgatattacagatgtgaaccaccatgaccagcctctgtttcttttgaaacaattttggcaattgataattgtcttagggaaaaaatttcctctgaattttcaaattcttaagcttagagttgtgtatcatttttcttacatggttttaatctcattctccataatatcctctttcttatgaatgttacataattgcattttctcaagtaagcttatcagaggcttgtctctcttgagggatctcaaacttaaatgcctacattgccaggcaactaagcatttgattttgagaccctcaaaaagttcccgtgctccttctgaaggcctatccctatacctacctacccctggataccacccctacccaccttctcaggagcctcatgtgattacatagccccttccccttgttgtacctccaacctttctctttgtctattgaattcttccactagcatttaaacatgccctaatctctagatttcccctgtttttccagctactccctaatctcccttctagttccttctacttcatgactgtattagttatctattgctccataacaaattacctcaaaattcagcactttaaagcaacaaatactgaggatctctctaggaatccaggagtggcttagctgaataggtctggctcagggcatctcactatgtcagctgaggctagagtcatatgaaggcttgccatggtgggaggtcagagggctcagttcctccccacatggacctctccaaagagctactcatgacatggtgacttcattcctccagaaaaagtaatccaagagaaagaaccaccaagacagagctacagcgtctttacaacctaatctcaaaagtgatagactattgcttctgccatatgctattagtcacacagacctaccctaatccaatgtgaatacctgcaagtggggaccttgggagccatcttggagggtgggcacattttaaaaattatttttccctggtgctaggtttttcttcaggtcaagaaaagtttcttctattttaccccctgatttctctgaatgttgcatcccatcgctatcaccatttatctgatgttgggcctccttcctctcttctcaatgtttactactttttcctgtcttgcatttcatcctgtacctttctcgctctattctgggaagctttctcaagttttctctccacatcactaatctaattttaaataggttttattcagcttcattattttttgaagatttaaattctataacaaaactctgcctattttttaacccccatttaagatagctcatcagccacctaccttgtcacttctgctgtattatcattcaccattagtctcatttcaagatcatatcttaagaatattgagaacacttcacaggcattttctaaaacttactccttcttttaaaaaaattttttaatatcaatagctttaggggtataagtggttttggttacaaggatgaattgtatataacagtgaagtctagaattttagtgcgcttgtcatccgagtagtgtacagtgtacccaataggtagtttttcatccctcacccccttgaccctccccacttctgagtctccattatccattatactattctgcatgcctttgcatacccatagcttagcttccacttataagtgagaacatgcagtatttggtttttgattcctgagttacttcatttagaataatggcttccagttccatccaagttgctgcaaaagacattattttcttcctttttaaggctgaattgtattccatggtgcatatatatacacacacacaaatatatatataacattttctttatccactcatcagttgatgggcacttagattgattccatatctttacaattgtgaattgtgctgccataaacacatatgcagatatctttttgacataaggacttattttccttgggtagatacccagtggtgggatggctggatcaaatggtagatctacttttagttgtttgagaaatatctgtactgttttccacagaggttgtattcatctgcattcccaccagcagcgtataagttttcttttttccctacatccacaccaacatcttttttttttttaactttttaataatgaccattctggctgggataaggtagtatctcatcgtggttttaatttgcatttccaacatgattagtgatgtggggcattttttcttacattttttggccatttttatattttcttttgagaaatatctattcatgtcctttgcccaccttttaatgggattatctggtgaggtttttgctgatttgtttgattccttgtaggcttcggatattggtcctttgtcagatgcataatttgcaaatgttgtctctcattctataggttgtctgtttactctgatgattatttcttttgctgtgcagaagctttttagtttaattaggtcccatttatttatttttgtttttgttgtatttgcttttggggtcttagccataaattctttacctaggctaatctccttcttgaataaattttttttccaaataattctccccttctatatctcaattctccatctcttaactataaattattttcttagctgtcatattagtattttctttttactaatttttgaacaaagaaaagtcaatccaatccaggtgtttaggatgtggataagtaaaacgtttttcctcactgtgagcctctctgttattagtatcttcctcttacttcttaggctggagggccagttgatataaacttgcaattctagttgtacaatccaacaacctgccaagggagaagagggaagaagattcatgcactcccctgcaagggagctttatttttgctcttctctgttgggcaaaaccactatcccatgaattaactctgtttctaacttactgtgtagctgtgtagtgaagagtttggtcctgccccaattgacgtctggcctttgccttaggcttctaggaggtaagctatgccatatctaataggagtgcctttgtttaaggatggggctggccgcactgggttaaaggcttaggatagaagctggccatgacagaaagcctaatcatgtgacttaggatgggggctttggagcatgaagtatcaattgacctgaagactaagttcaacaacaaggcaatcaattgatcaatcatgagcacataacaaagccccaaataagaattctagataccgaaactttggtgagcgtctctgattagcaatactttgtgagtattgtcacatatcaataccagaagggtgacatgtcctgattccatggggaaggaacagaagcctcacgtttggagcactcccagactctgccctatgtatctcttcctttggctgattttattattttattagttacttagtttagttaattagttgaacagcctccctctgtcacccaagctggagtgcagtagcacaatcacagctcactgtagcctcaaattcctgggctcaagtgatcctcctgcctcagcctcccaaaacaatgggattacaggtaacagtcactgtacctagtcttttggctgattttaatctgtatcgtttcccttaataaaccataacagtgagtataatagctttcagtgagtcctatgaggtttctagtgaattatcaaaactaaaagcgttttgggggagccctcaaacttatagttggcatcagaacagagggtgttcttgtgtggaaactgtgtcctcaaagtttgcagtttggctaatgccaggtactgaactatgccaaggtccagccaagaccatacactacctcttacctaaggctgctgttttatgttggctgaagccaaccctgtaaatgctgggcaaaaggcagtccaagtattgaaagtctcccacgtgtccctagctcccttacctctgtacctcatcacttaagttagagggtcccatctgggtcccatctacttactgagagagagagagaccagaaagcctactgtcaacctcttcttcagtgttgtcctgtatatgccacattcagtacacactccttgaaatccctgacatggattatttttctccacttatcatattcagttggtcttttttttttttttttttttttttttttgagacgaagtctcattctattgcccaggctggagtgcaatggcacaatcttggcttgctgcaacctccgcctcgtgggttcaagcgattctcctgcctcagcctcccaagtagctgggattacaggtgcgctcccacgcccagctaatttttgtatttttagtagagatggggttttgccatgttggctaggctgttcttgaactcctgacctcgggtgatgatccaccagcctcagcctcccaaagtgctgggattataggcgtgagcccccgtgccagtggtgagttggtcattttaagagataccgtggattgtgaggtggtgagaagggagtcagttggtggagtgagttatattgctctcttaacaggaaaagatgaaatagacctaaaacaagatttgagctaacttaacatgtaatattttgttggggagggaaaccattggaaaagtacgtatttattttaatctttaccccatctatctctccttgccatacctgcatgatatggtttgagtatatccctcaaaaagttcatgtgttgggaccttaattcctaaatgtagcagtgttgggagggggtgcctaatgggaagtgtttgggtcatggggctccagcctcatgaagggattaatgcagttctttatgtgtgtgtgtgtgtgtgtgtgtgtgtgtgtgtgtgtgtgtgtatatatatatatatatatatttgttttatttatatatatatttatatttatatatttatattatatatattatatatatttatatatttatattatatatattatatatatatttatgtatatatatatttgttttattatactttaagttctagggtacatgtgcacaacgtgcaggtttgttacatacgtatacatgtgccatgttggtgtgctgcacccattaactcgtcattaggtatatctcctaatgctatccctccccgctccccctacctcacaacaggccccagtgtgtgatgttccccttcctgtgtccaagtgttctcattgttcaattcccagtgcagttcttaagaaactgggttagttctccagagagtaggttgttataaagtgggtcagcccacttcatttctcttcttctcacaggcactggcttcaccttccacttttccaccatgctgtgacacaccatgaggttctcaccatatgtggccatctgatcttggacttcctagcctccagaattgtaaacgaaataaatctctcttctttataaattacgcagtcttgagtattctgttctagaagcagaaaaccaactaagacagtgccctccaccttcattgaaatattaagtaagccactgccagtcttgtttcttgcctttataaagttctagctttaattgtgagctcaccatagataccagagttatgaacaatagaaaatatcatatccatgacaaccaggaagcccaaggcagtggctgatttcaaccatctggttctaacctccttctttatgtatctcttttcctcgtgggcttcccttacttacataaagggcaggcactgctacacagacaggcaggaaaatgtccacagtgtctgctggaggaggtgatccaagtatctgcatatggtagataccatgtgaacaattgagaagagaggaaacaactactgctaaagatattagaaaggcttcctggtttcctcatttgagctcagccttcaggatggcaagtgagttttgctggaggaggtcatacaagtaagcattctaggaagaacattaccagcatgcaaaaggtgcagagaagggaaaaaggaaaacgatgctcataaaatgatgatggactcacagtggatttgtttaggggagtagggagataagaacaaaaaatggcttagcaacacattgtggaaatttttgaatggtcagctgaagatactagactcttttcagaatcttttgctttttagtatagtacttggaatactttgtctccttgaattgcatgcttacctctcctgaatggcacagatggtctttttttgtgctacatcatttaacacagtgccttgcctagtgatggtcccaaaacagttgttgatttctattgaaagtgctgactaggtaataagaagtcattactacctaactatataaaagaaaccagaacctacaacagttcctattgccttttcaccatccctcctttctctacttttcaggcttaaattttatgattcacgtgtataatcactcacttaacacacaccctcaactctctggtcctcactcacctggctaaaccccaaccctggtttaatgcaactctaacctgctgattaacatttcattgcttacatgagaggaggcagaagacagagcctttgcctaaaaaaataggttagggcttgggcactaactcgttcaccacccactggggttcaacctgaggagcagacacacagatttctctagtcttacggtaaagagttattcatccattcaagcacctttaaaaaaaacacacaaacaagctcctagacgtaaagagctgctaagtcatcatacctatgtataccagaaaaagctggacaaattgaagataatagactcttcttggaaccatcagagactgaggtcacagggcaaaccactaccctgagctctggagagacagatgcatccacagagctattgctcctgagatctacttacctagaataaaagccattagaatcagtaagctggtgggaacacttaaattattactttgctgaattgcaggaggctgagtgcagacttgtatgagagtgagaaactctggtgagggcctgcagccataagaggggcttgacacttacatggactgtcactccagaagccccactaggttcccatggggataatctgagaaagagccccttcgggtcaagatgggagaagagaagagtaggcatctgaaaacctgcccagactatcattcctagcaaaggcttagtccccaggtagaaagaacacctggcctgcagaggaataggattacagtgaacttctcatcagaaaccatgcaagcaagaagaaagtgcagcaaaacccttaaagtgttaaaagaaattgccaatctaaaattttatatccagagaaattatccttcagaaaaggaggagaaataaacactttctcagacaaaaactgagggaattcattatcagcatggaatgttaaagttcttcaggcagaaagaaaattatttaggtcagaaaccttgatctacgtaaagaaaggaacaccatcaaaggctaaacaaagataatacacaattgtttaaaattcttaattgttctaaaagaaaacttgaaaatggtaattaacagtgtattgtatgcttggacttcccagcctccagaactgcaagctattagatatttaaaaatatctaatatggataagtgaaataaatgatagtaatgtcacaagggatgggaaaaagaggttgggaatgctgtattatgaggtacctatactagatatgaagtggtatagtattatttgaatgcgggcttaggttatttttaagtgcagattgtaaaaactctaaaacaaccactaaaaaggttttaatagtataaatgatactccaggataaaagataaaacggaatcatataacataattaaaacaagagaatgcagaaggaaggagtgaaaagaaacaaaaaacaaatgaaaacaaaaatagttatgaagatggtgaagatggtagtttttcattcaactatatccataatcactttaaatatgatgtaaatactccagttaaaagacagagataatcaagttgaatgaaatttaaaaaagaaaaaagcaagacctaaccatattatagaaaccactttagatatagaggcccaggtagaaagtgaggaaatgtactgctaacataaggataaatacataggtcaatggaatagaattgagagtccagaaataaaccctcatatttatggtcaatcggttttcaaaaagagcgtaagacaattcagtggggaaaattggctttttaataagtggtacgtacttgggcaactggatatacacatgctaaagaatgatttggacccctacttcaaattatacacacacaaaaaaactgaaaatggatcatagacctaacttcaagagctaaattgcataaaatttctagaagaacatactggagaaatctttgtgacatcaggttaggcattggttgtctggatacaacacaaaatacgcacacacagaaaaaataggtaagttgactgcatcaaaatgtaaaacttttgtgctttaaaggacatcatcaaaaaagtaaaaagacaacccacagagtgtgagaaaatatttgaaaatcatatatctgataaggggctggtattcagaatatataaataaatcttacaactcaacaacaaaaagataaataactcaatcaaaagtgggcaaagcctttgaatagacacttctccaaagaagaaatacaaatggccgacaaacaaaggaaaagacgttcaacgtcataagtcactagggaaatacagatgaaaactacaatgattgctgtcaggcctctgagcccaagccaagccatcgcatcccctgtgacctgcacgtatacatccagatggcctgaagtaactgaagatccacaaaagaagtaaaaatagccttaactgatgacattccaccattgtgatttgtttctgccccaccctaactgatcaatgtactttgtaatctcccccacccttaagaaggttctttgtagttctcctcacccttgagaatgtactttgtgagatccacccctgccggcaaaacgttgctcttaacttcaccgcctatcccaaaacctataagaactaatgacaatccaccacccttcgctgactcttttttcggactcagcccgcctgcacccaggtgaaataaacagccatgttgctcacacaaagcctgtttggcggtctcttcacacggacgcacatgaaaattgccacttcacattcactaagagggctgaaattaaaaagacagacaataacaagtgcttgtgaggccatggataaattagaatcctcatacattgctgatcctaatgtaaaatggtacaatcactttggaaaacagtcctgcagttcctcaaaatgttaaacatggagtcatcatatgatccagcaatcgcacttttaaatataatgaaagagaaataaaaacacatgcctacacaaaaacttgtacatgaatattcataacagcattattaatattagccaaaaagtgaaaacatgtccatgagctggtgaagaaataagatgtgggtatccacacaatggaatattatccagcaataataaagaacgaagtgggccaggcacagtggttcatgcctgtaatcacagcactttgggaggccgacgggggcagattggttgagcccaggagtttgagaccagctgggcaatatggcgaaaccttgtctctacaaaaatacacaggttagctgggcatggtgacgcatgcctgtggtcccagctactcaggaggctgaggctggagggtcacctgagcctgagaggcagaggctgcagtgagcccagatcatgccactgcactccaagctaggcgacagaacaagatcctgtctcaaaaaaaaaaaaagtgctgagacataccaaccgtggatgaaccttgacttattatgctaagtgaaagaagctagtgtcaacgaagagtcaaactctgtaaaatatttgaaggaatttattctgagccaaatatgagtgaccgtggtctgtgacaaagccctcaggaggtcctgagcacatgtgcacaaggtggttggggtgcagatttgttttatacattttagggaggcatgagacatcaatcaaatacatttaagaaatacattggtttggtccagaaaggtgagacaactcagggggactggggagggagggagggagggcgggggagggggttgcttccagctgaaagtttctctcccgggcctgcaagcttaagggaatgaataactcctccttcctcaggcccagtcccaaggtgcaaggccacctgcaccagcaacctgcatcggtgagatagcagaggcaggaagagagctggccggaagacacgtactccctgaagaccgagagaggccaccggggtaccgcgtagccgttacatcagactgagacacttcctgtttacaggagactataaaacccctgccccgtcctcatctggtgctgacaccattttaggtctcagcccacctgcacccaggtgctcattgaaacaacgtgttgctccaaaccaccttgtggtgtttgtcggcgcgctctcgggtttggaaccaatacaagagccttgcacctgcaggctgtaggtaatataggtaaatttatacattttctggttgacaattggttgagtttaagacctgggatctctagaaaggaaaatgttcaggttagataacagactgtggagatcaagtttcttttttgttgttgttgtttttttttttttgagacggagtctcgctctgtcgcccaggctggagtgcagtggcccgatctcggctcactgcaagctccgccttccgggttcacgccattctcctgcctcagcctcccgagtagctgggactacaggcgcccaccaccaggcccagctaattttttgtatcagataattttttgtatttttagtagagacggggtttcaccatggtcttgatctcctgacctcttgatccgcccacctcccaaagtgctgggattaaaggcgtgagctaccgcgcctggcccaagtttcttttgaagtcttatagtgactacccttggagacaatagatgagaaatgtttcctattcagatctttaaaaggcactagactcttaattaatctctttgggattgggagggcctggaagaaaaagatctagctatgcaaatagagattctttacaggtgcacattttcccccacaaaggacagctttgcagggccgtttccagaaacatgttttgggataaaatatttttattttctttcttgcctcataatgttttccaacttgccagagtcaggttggaaagtaagtcacgatatatagggctaaataaaacccatctgatgaaaatttatggtttgtagggcatgactccccagaccccttagataggaatttgggcaagataaaaaatcaaagcttagtcctcaccagtcacaaaagactacacactggatgatttgatttatattaaatgtctataaaaggcaaatccacagagacagaaggcaggttagcggttgcctggggatggggtggagcaagggatagcatgaataaggaatggctgctcatgtgcaaggggtttcttcctggcgtggtcaagagttctcaaattaaatgtggtgattgcttcacaactccatgaatatactaaaaccactgagacagacactgtaaaggggtaaatcttacagtgcatgaaatatacctcagtaaaactatgtttaaaagtgaggggtaactatattaataaaaccatgggtgtccaatcttctggcttccctgggccacattggaagaagaagaattgccttgagccacacataaaatacactaacactaacaatagctgatgagctaaaagaaaactacacacgaaaaaagtttcataatgttttaagaaagtttatgaatttgtgttgagcctcattcaaagccatcctgggctggtctcaaactcttgagctcaagcaatcctccagcctcgtcctcccaaggtgctgggatgacaggtgtgagccactgcgtctggccacctggacttctatggagtgcagaagtccatggtaatgacctgaacttagcatttcatcagacttggtgatgaagccaggaaacaggacaagcactgggccctgacagacagcttcccatggtgagggcagaggaggaatatactcagcaggacggtgcatgctgcagggagcagtggctcctgtcactgtgagactgtgctgggaaagcctctgtaaatcagccccatggggcatcacacaccctgggagagagatccatgtcgtaaaaccaaagggttgtatccccaaggcccaaacctcacagtgctccaggaaggctggctagtacaaccaaaataatggaatcattagaggcccaggtggctctgatgggagcccaactttggtgacaaaaagaaaataacattttaaaaaatatttataaatgtagtgcatttttgttacatgaatatgttgcatagcgatgaagcctggacttttagtgtaaccatcacccgaataatgtaaatggtatccaacaggtactttttcatccctcaacccccttccaccctcccaccttgtggagtctccagtgtctattattccactctgtatgtccatgtgtacacattgtttagctcccacttataagtgagaatgtggtatttgactctctgtttctgaattattttaggtaggatcatggcctccagttccatccatattggtgcaaaagacattctttctttcttttttatggttgagtagtattccatggtgtatgtataccacattttctttaccccatcatctgctgatggacacttaggttaattccatgactttgttattgtaaataatgctgcaataaacgtacgagtgcaggtatctttgtcatataacgattcatttccctttgggtagatacccagtagtgggagtgctaggtcaaatggtagctctagttttagttctttcagaaatctccatactgttttccatggaggttgtaccaatttacattcccaccaatagcgtatgtgttcccttttctctgcatcctcaccaacatctgttgccttttgactttttaataatacattgacctagggaaagaatttatgacaaagacctcaaaagccatgcaacagacagggtgcagtagctcatgcctgtattcccagcactttgggaggcagaggcgggtggatcgcttaaggccaggagttcgagaccagcctggtcaatgtggtgaaatcttgtctctactaaaaatacaaaaattagccgggcgtggtggcacacatctgtagtcccagctactcaggaggctgaggcactgaggtgaaatttttcccttgacccccttcatgggcaggaactggagtcgctcatctcattcaccctgcagttcatggatggctaagtgttaacaacttggtgaagggtcagggtgacagcctcctgcacctgccctttttgacacccaagttcttgtttggtgtccaggaagaatcaggtcatatgaactatttgaagggtagtatgtgaaggattttactgggcagtaaaagtggctctcagcaggacagggaattggaagggagatggtgcgggaaggtgatctttccctgaagccacaccatctgaagttaactatgtctatccgtagtcgccgacgctcagccgcatgtatccctgatactcagcagcttgcagccctgaccacttgcatcagccgcttgtgttgttctttcagctgaagtctttttatgggcacagcataggggcgtggcaggccaaaaaggcaatcatttgggcagaaaaatggggtcagctgttttcacgcagggccgaggttccaggcttgagggtggagtttagctgggaacccagacctgcagggtcagctgctttcacttagggccaaggttccaggcttgagggtagggtttagctggaacccagccattctgtatcagcaggagaatcacttgaacctaggaggtggaggttgcagtaagccaagatgaagccactgcactccagcctgggcaacagaacaagactctttctcaaaaaagagctcctcctggagggaggagctgtggtgctggaactctggaaacaactctttctgtgtgtattagcatctgtgcatcagggctggtcccagcagatccgtcctgtgactctctttcccctgtggcctcccctccctaggagggagatggggttcccagctggctcctgggccctcgtgttggcctgtcctgccacgctatcctaactggtcaggcccatggtttgagttcaagcagcaatcccagacacatgctcccagggttcttggatgtcactaacaaccctcacttcttttacatcattcaattgggctgcattcacagactgtttctcaatttctcctctaaacaggtatgagtttcttataatcccatttccaggatgagggaggctgtcctttgggcactgatgtggaggataaacttgcaaagctctcccagataaagagaaaaatgataaagtgatgaaaaatgagagagaagatgatagatataaaagtatagaaaccagagatcaacccaagaacagagggtgttcctgagtaagaagcaacaaccattagactagaacaaataatcaaaggcataattaagaaaaaccgaaactgccattgcaaaattataactgaaacagtgacagagttctgagctaacccactccatcttgcttctaacctccaagctgcccttgttcattcctgggtgtaggctgagctaactttaggaggaatttagtttatagtttattgtttgaaacaaagatagcatccctttcaaaacaaacccccttcttgcctggggactagactgcctttgtattataggactaacaaattagtcaaaaaattagaaattatggtttaagagtcatgcagctggagacagattctgaccctccccaaattgctcctggggataatatcactattgtaaaacctaagatcagtgcttaggatatttcgcagttcctgcatttggtgaatcagctggcaccacccagattggtaactggctcgtctgatcttgtggtccccactcaggaactgactcagcgcaagaagacatcttcgacttcctatgattttatctctgacccaaccaatgagcactcctaactcattgccccccaccaccaaattatccttaaaaactctgaccccagaatacttgaggagactgatttgagaaatgataaaactcgggtctcccgtacagccagttctgcgtgaattactctttctctattgcaattcccctatcttgatgaatcatctctgtctaggcagtgggcaaggtgaaccctattgggcagttacaaaactgtcccaagaatgaaaagattaaatctgaatatttaaattcaaagaactctttacattgcaggaaacatctgtgaaaagaagagctctgtacccaggacatcctggcagaattcgatttactttattaaaaagaaaattaacttttccattatgaaaagaataaagaatatacaaatatattctaagaaaatacagattagcaaaaggaaggaataaaaatcatccattgcactaccacccagaaaaatactctgttaatgttttggcacatctcttttagtcctattaatatacatattattttttacataattgcaatttacacaatatcaaaaatttaaattttctatcatttaaaaacacttttaaaattataaaattaatacatgctaatgaaaaggtttaaaattggagggaaaatacgaagaaaaaggttgcccagaatccacttacccagaattaaccacagttaatactggggtgcatttcttcatagccttatctgcacttttgtacataatctaatctaattcttttttttttttttttttttttttgagacagagtttcactcttgttgcataggctggagtgcagttgcacaatctcggctcactgcaacctctgcctccctggttcaagcaattctcctgcctcagcctgcccactagctgggattacaggcgtgcgccagcacgcctggctaatttttgtatttttagtagagacagggttttaccatgttggccaggctggtctcgaactcctgacctcaggtgatccactgcctcggcctcccaaagtgctggtattacaggcgtgggccagcgcgcccggctaatctaatctaattcttaaacattgttaatatggagcatttcagagactccagacagtaaatgatgtaaaggcttatggaggggataaaaggttagccacaaggtgatttaatagtctttcattttaaataaagcctaaatactcaagataattcaaaatgagtttcaaacatgcaaaaacccatacaaaacatgtagtaactcttctattaatacctgaggtttaagtggcttagccacgataagcagcattggaacgtgacagcacacacttgtttaagttccgtgaagtagtgaggctttcatgacaagcctgttttctggttctaggagagccatacaagtaggaaaggaggaagcagaagggccaggcctcattactaccacagaccccacatcatcccattagaatttggactttggggcccaagctgaataaattcttttgtactgcaacagtttcatgggggaagagaggcaagagctgtgctcaaagggaaacacatcgccttaaatgctctcattgtgacatgaggagaaatggaaaaattaacccagcactcaacacagtaacataaagaagactgaaagaagaatgtaataaaaataacaactaagtgtgagggagaaaatgaaaaatctgtaaattgatcaatccacccaagagccagtttctgggctgtgggtcaattcaccagaaaacaatttgctgacagtcaaatgctccctctccctctgcctttgcacactagggccatcttctcattgtgtcctcacatggcctttcctgggtgcacacatgtggaaagagagtcctctgtcttcctgctcttttttttttttttgagatggagtttccctcttgttgcccaggctggagtgcagtggcgccatctcagctcactgcgacctccgcctcctgggttcaagcgattctccagcctcagcctcccgagtagctgggattacaggcacctgccaccacactcgaccaatttttgtatttttagtagagacgggctttcgccctcttggccaggctggtctcgaattcctgagctcgtgatctgcccacctcagcctcccaaagtgctgtgattacagccataagccaccacacccggcctgtcttcctcttcttacaagggcactagtcccatcaggggttctagttacttcccaaagtccccacctccaaataccatcatattgggggttagggcctcaacatatgaaggggcggcagtcaggggcagtggagggagaacacaaacattcagtccatagaagatacaattctaaaagactgaatttatcatctgatgaattgactgggcctgcatgggtacatttttaaaataagctaggaagggggaaagccttcttaagcatgaacatgaaacctggaagccacaaaggacatgataaatgaatgtgactaacaatattaaatttattaatttttttttatttgagacagtctcactctgtcacccaggctggtgtgtagtggcacaatcttggctcactgcaacctctccctctggggttcaagcgattatcccgcctcagcctcctgagtagctggtactatgggcatgtaccaccacaccttcctaattttttaaatttttagtagagaggggttttgccatgttgcccaggctggtctgaaactcctgacctcaagtgactgcccacctcggcctcccaaagtgctgggatttataggcataagcgcctggccacaattttacatttctacactgtaaaggtatgtttgtgcttgtgtgtgtgtgtgtgtgtgtgtgtgtgtgtgtgtgtgtgtgtcttaaatgaaatcaaaagaaaatatctgtaatgaaaaagaccaaaattaatttcccacttatcaaaaagtttgcataaatcagtagtgagaaaaaccaccttattaaaaaaattagagaagtatgtgaacagacttattacagggcaaaaaatacaaatgatcaatacacatgaaaagatgtccaaccttccaataacataaatttgaatcactaaatataactttttaatgtatccaagtaccaaaatgtaaaagattgataataagttatgttggcaacagcgtggagaacacatgtgttctgataccaggaatgcaaatgggtgtccttttttgttgagaaatctggcaatatctatgaaaattttaagcatgcccacttatggaatgtgtcttacagaaatcacttgcacaaggaggcaaagataatgtacaaagatattgtatatagaagcataaattcttggtgttggaaaggaacctgtggggtacccagtccaagctttgaggtccactccagtgccaggatgccctgggctacatccctgactctctctgcctgggtgtcccttagatcttatatggttggtgactgtataatctagtaacatataggcctttcaaaccatgagcagaatatcttcaggaacttgtgtgagcatcagacacctactctcctccgagtgcccaatggtccttcactgggagcacttaaggcagcgtttctcaaacttcaatgtacaaacaaattatctgaggctcttgccaaaatgcaaatactgatttggtctgggatgggcctgagattctgcctttctaaccagctcccaggttagatgatgcggatgctgctggtccagggaccacagtctgagtagcaaggtcatgagacgtactctattttctacctttggtcttcttgttttcacacctgggttttccatcaagtatgtaggcatcagtcccgtgactctcatgtcctacagataggccccatgacttggtcatgcccttagcattgacctcgtacactcatgctccactccactattttcaccatctgttctcctgtagagcagggtagtaggtgatggctgtggccaccacagactcctaactcagacaccagaccgtatgtccttcctgctcaaggtcatcccagctgctcctcaatatgccaggcagaccgcatctctggcaccagcacttgttgccccctgtgcccagaattccactctcccagacatccacggagcttgactctcatttccttctagtatctactcaaataggagaaagcagggctagagatgcaaatttgggtgtcaccagcaaacagatattgtttaaaaccatgagaccagaggagatcactcggagagtatagacagaggcaaatgggagccttggctgaagtcctgtggcagcacccacgtacaggatgaggaggaggaagagggggaggcagcaacaagaggagtgccagtgggagacaagggaaccaggtatggggcactcaagaagccaagagaagagcatggctggagaaggatggcgtgatcagcactcctgtgtaaaagcagcagcttgaacactcatgaaaataccgtgggcggtgagcacagggagaatgggggaggagatgcagcaagggcactttggagaggtcactaaggtcgctgatccctggagtcgaatgctgggttggcagtgaggaagccaaaggcctgccctatttttaccattgaatccccaaaaggctgattaattggtgacacctggcccctctggacatgaagatggaggaaaaggctgaagtaatgagaactggaaaaaagctgtttaaggaattgtcagatccccagatctccccaactctgtttagccagatcactgactttctgccctcccctgcagaaagccagagattcatttcaagagggtgaatacaggatctggttaggagacactgaactcagtggaaagcaaggagtcacactgagaacaggagaactacatgagtgtgggcactgcggatgctggggcagccctatcccatcccccagcctcattcctcatgcggttcccagaacgccagccaccatcccaacaggaagcagagaggtttccagtcaaagggcccagacagttgaagctgccaagccccacctgtgcactcggagcatccaatcagctgtgaagggctcacccttccacacgagcagattgccagatggctgaggaagaaaggtacaggaaagataaatcccaaaccaatacaaaataatcaactggaagacactggaactatacaaggagaagaacacttcaaaaaaaatcatgagggccgggcgcggtggctcacgcctgtaatcccagcactttgggaggccgaggcgggcggatcacgaggtcaggagatcgagaccatcctggctaacacagtgaaaccccgtctctactaaaaaatacaaaaaattagccgggcgtggtggcgggcgcctgtagtcccagctacgcgggaggctgaggcaggagaatggcgtgaacccgggaggcggagcttgcagtgagccgagatcgcgccgctgcactccagcctgggcgacagagcgagactccgtctcaaaaaaaaaaaaaaaaaaaaaaaaaaaaaaaaaaaaaaatcatgaacacttttacagccaagaaatactatccaggaaatgagataatggagcagtgcctactaactctgagttacattgtatgacacttagttgatgtctaccagagaattggggttttttttggtgggaagaaatcccacatgtcagtgaccagaggtgaagtattgtatagtgagtgtgagtagaaaatttgtttaaagtttgggtgctttttaaaaaatatttcttacaactatatttagatggtagaagaaaacaaatccagaaagattgcacagcagatgtgatatttgaatgtggagctggaagtataccaaggatttcacccaggtggacaaagatagggagaatattcaaagcagagacaacaattgatacaaaaaaaaaagatgaaaggggccaggcgtggtggcctgtaatcccagcactttgggaggctgaggtgggcagatcacctgaggtcaggagtttgagaccagcctggccaatgtggtgaaactccatctctactaaaaatacaaaaattagccaggtgtggtggcgggcacctgtagccctagctactcctcaggaggctgaggcatgagaattgtttgaacctgggaggtgaaggttgcagttagctgagattgcgccactgcactccatcctgggccacagagcgagactctgtctcaaaaaaaaaagatgaaagggtaagcgtggtatgagatagcacatcaacccaaaatggattggcattcaacaccaaataattgattttcactcatgcatcctcaggttgcctgggattgggccaacatagactgagtttggcaggcttggatctcaattgcaggttggatccaggagtatttcatcctctttggaccaacagctgtctaaggcaggctcttttcatgatggaggcagaagaacaagaaaacaagcacatttcaagcctctggacccaccgcgtccactaacatgccattggccagcataatttacatggacaagctcaacactaatgggttggataagtatattcctcactcacaaaagcttaaactttattcctgaacaataaactctagccaggtggggtggggagcacctgtagttccagctactcaggaaactgaggcagaaggattgctggaccccaggagtttgagaccagctgggcaacacagtgagactatatctcaataaagaaataaataaataaaacaataataaaagccaactctttaaagtgtgtttggggaataacatgaacatatgtaacttctgtttttcagttaactttctgtatgcatttcccttatttccatccttccttccttcctccctctctctccctctttctctttctccctttctctctttctctttctctctttctctttctccccttccttccttctctttctttctttcgttctttctttctttcttgagatggagtctcactctgttgcccaggctggagcgcaatggtgcgatcttggctcactgcaacttccgcctctcgggttcaagcaattctcccatctcagcctccccagtagctgggattacaggcactcaccaccatgcccagctaatttttgtatttttagtagagactgggtttcaccacactggccaggctggtcttgaattcctcccaaagtgctgggattacaagcatgagccaccatgtctggcccccttgattcttttatgagatgagcatgtgcagctacaaaaggaaacacaggagaggctcaggaaaaaacaaagtctcttgtactcacaggtcccagagaccggaggcatggcaagccatgaagggccacatgggagagacaccagagtggtcaggaagcaaaagacaggaggagaaagccgaggctagagccttcattggggtttcagtgggaaaagcagaacagggcagggtaaacagtttaggactggttcgtttgcataatttggttgatctttggcctatagtagtgatctctagttgcctagtacctggccctgggatgattaaggcagaggaatattgcttcctgagctgcatgggccagatagggaaggtctggtttaggactggtttgttttcatatcaaaggcacgttcctggctgggtccttcgttatctctaagaattggctggcccaggggggaacagtctctctccagctaaaaaggtttttcaggatcaaagtatacagacaacttaaaaaaaaacaagagtaaaagttatttgaccaacatcagccatgtgtggctaatgaacacttaaaatgtgacaggtgtgattgaggaattaaattttagttttatttaaatgttttaatgtaaatttaaagagcacatgtggcttatagctatggaacatgcagctgtgaacactatagttaaaactgacattttgatctgaggattccttttatttaatcagttctgaaactatagttttctacatttatatatttgttctattgtgaattttaggatttattttgatgatgtactttttctttgtgaagtttagaaatgaccatgggggtcatgtgggccaaattaactcaattcctggacaaaaactatttccccgaccaccccaagcttcttgccaatgtgcgcccttgggacaagaaaggctaggagaagctgtggacaaattaagataaacctggcaatatcattagacaaataacccaaagtgaatccctcttctgatggtcaacatcagatggtcacacagaaatgttattttcctatgagtaattttgcattattgttacatatgatttccacttacaaatgccacaaatattatgcaagtacctctctactgggaaggaatataacaattctaacaaataaacataaaagcagtgtgtacataagaatgcctctatacaattttttgagcatcaaaatcttagaaagttgaaaaataccaatgaaatatagcattcttattctttctcatttcttttatctgttctttagagaaaaaaagatggagcagaaagcaagaaaattgtccaacagaattattgcaactgacttagtttcttataaacaaagaatgcattgaaagagaaaaccttgcctcagcaaagtatattacacaataagaaagaagaatttcaaagataatagagataatttctcacagatgtctgaccagaaagaaattctcaactttctaaacttttctatcataatttcacatatttctctggttcatttataaagggaaaataacttgagaatattccaagatgaatacatcagcactcacataggtaaccagaaacatggggtgttaaatcaattacaggagcagctgggttccttatccagataagacagcgaaaaaagaccaagaagccagtagccggtgactttaaaaattgttcgaatatgcttcctcctcactttgtctcttgaggttctttgtaaaagccagggtttcacaattaactttacagcaatcaaaaagctttaatcagtcactaaaacaaatgctattttcacttatcaaattggtaataattaggaaaaaagtgataatatcatgctgggatattcagagcacgcttttgtgggaatctaaattggtgcaaccactttggctgcatgcctcaaaagcttaaaaatatgcccatcttttctgcaccttctactcctgacaacttatttaactacagggatgttcttcccagctatgtgatatacagccattaaatggctgaatactatgcagccattaaaatattgttgcagaatatattgtgatatggggtggaggtggagcctagctcaaaaattatgattgtatttgggtaaggaaaaattatatgtatacataaaagtaatatgaaggggatagacttatgaatattttataaatattttagatattttcttcattttcttttattcttttctttagtcttatctatattttctaatatgtctatttgatatgtattgcttttacaagaaaaaataacttcaatgatcctataaaaggaggagagagtggggagcaagtgttttaaatactgcgacatgaggctgtgaaagctctcagaatcaaaatgaagtcacctatgttaaaaatcccaacaaacagagccagacgagaccttgaagagagggttgtcatgtacaaaaactattgcaagactgcaaaaatcacaaccttgcacaaagtccatctcaaccttacgcaaaaaaatacctctacaaggacatctgcccagcaactgcctgtccaacctcagactggtgctaccctcgttattgaaccttgtagtcaaggataattaacccaaaacagttatgtaaccctccttatttttcctctaaaaacccttgtcttcctttacctccctgaataggtacatagtgtattatagtacatgcatttccatcgcaatgcctattcccaaataaatatcattttcttttcaaaatgtttgttatttaggttgacaaggcctggctgcccactccgtggtggttgccatctgttgctttattataacaaacttcatttaactcaagccaggctgagtggctttctttatcttgctatcgatgctccctaatactctaaccccaactttgtatcatctggaatccggagatattttttagccaaacaagaaacccacatgttgatttgtaacatttcagcagcaccacctgcatcaccaaagactttgagacttatggaaataaattcaaatcctcaacatctggaatggttgagacacatgtataaagaacagaaatttatttctcacagtcctggaggctgggaagtccaaaatcaagactctggcatgtttggtgtctggtgagggctgctctttgcttccaagatggcaccttgatgctgcatcgtctagcggggaggaacagtgtgtcctcacatggcacgaggcagaagggcaagagggccagacgctgctgtgtgaagcctcttttaaaagggcctgaatcccattcacaaggaaagaatccttgtgactgaatcacctcttaaagcctccacttcctaatactgtcccatgggccattaagtttcaatgcctgggccgggtgtggtggctcacacctgtaatcccaacactttgggaggctgaggcgggcagatcacctgaggtcaggagtttgaaaccagcctggccaacatggcaaaaacactgtctctactaaaaaatacaaaaattagccgggtgtgttggcacgtgcctataatcccagctacttggggggctgaggcaggagagtcacttgaacccgggaggcagaggttgcagtgagacaagatcatgccactgcactccagcctggggaacagagcgaaactccgtctaaaaaaaaaaagtttcaatgcctggatcttggaggggacacattcaaaccgtagcaccattttatattatttgtggattagggttaatactttgtcatctcagacaaaccatttctaagaaggtagaggtttgcgtgtgaggcttgagccacaggtatgacactccattgtcatgcacaaattgttacttccttaagatatgatccaacagacctggagacctgaatgcatttaacacaaatgaaagtttctgcctcctccctcagcccatttgagcttccatttccctctgacccagtgcgcattctaccctttgcagtctcaagatgcttctccctggcagaaaaatcaaaagcaaaatatgaacaagtataagccagaattttcagagtaactttccagattgcttcaaatggcagcatttccaatcctggtttgtctcatttgctttattcaataaaagaacaagaacaagaacaagaaaaaaagaacactactgtgtatgagctttgacatcacttctgaccatttttactttcatgttgttaattttgccatttgattttgtttccattacatgctattaacttctgttcagatgtcactcatttaaaaatgtgggggtatttcccattgttgtcccagtcaggcaattataacttaacctaaagacagccctgctctcaggtcagccttgccataaagtccgattcaaagaaataacagtccatcagaaaaatgaaaaccattaaaatctttgtgtgtctctcaagaaaataccacaggatgagtaaacaaagctgaaaacaagatagagaatagagtctctcaagaaaataccacaggatgagtaaacaaagctgaaaacaagatagaggatagaagttgatagagagttagaattttaacatgtgacacgccattagtaagtgttttgaacaccaagggtttggagggaaagaactgtgtggtcaggacagcaagcctggaagctgaccctggctggcaacactcaaagtaacaagacaaagatctagctgagggaggaggctcagagggcctcaggatgctgccatcctaatgaagaacaatcacacggagggtgaaggcagtgttcaccctctgtgtgaacacatcctcctaagaggatgcactgccctcctcctagaacactgtgtgagggatcccagctacccaaggtccaggagccacatgaaagctgcttgaagatgtcccttgcaaacctagcatctgagaatatggacccacaaaatacattcattaaggagaggcccattttatataatgtacatttacaaagttaatacacttttgacatattttcacacttttatttcaaaaacatcttgaattacctgcaaactttcaggaactcatcaccaacaaggtccattcatgatgtagtgggaaataaccactgtgtaatgatagcataagcaaattcagttttaatgagaggaaataggggaagaaagttgaagataaaacatgcttcctttataaatccttctttattttattgtccccactcccaaccaacccccaaggccaagtaaagagctgggagtaaaaagttagggcactgaagatagattcgggagacgtctgggttcctcacctgctaatgcaggacccagtttcctacaaaacagcgtctgcctgtccaaggattgtggaaatacaggtgtatgttcctgcatgtgtatccaggaagaacaagtccctttctcaggctcgagcccctggagccaggccctcttcataggccaccccacagtcaccaccgtggaggttctggaagcctcaggatgccccagggacttcccacccccaagccaggtagtgccccaagcataagtgaaaacacccttttcactcctttgtttccctagaaatccagcagcttctaaggttcatgtgctacaactctttccatttttaatatccacacatgtgcaggtgtggtaatggatcaactactgtgagcaactggggcttcaccccccacagaacattctacgagatagagggtggtagcacacttcaggtcatccagctgcaagagtgaggagttggagcatttatccacagactcccatctcccactggggagaactgccctgggacccctgacaccacacactttgggggtgcttctagggggagtagggcaagttcagatgatgccagaaaaagtcctcaggcagagaagagagaggcaggcatcagggtgggaaggcatcagcattctggaagccttagttacaggtgaactcagatgggccaaggggacacaggacaaggtatcgacagcatctgccacaactctcttgggaggtacacaaaaccaactgagtaaacatttgtattatttcctggatataggagcaatacattttacataaagatgatgattcttcacaaatttattcttaagtgcaatgccatttcaataaaaaaacccaaccataggtatcatggaatttgacaagattacaaaattaatctggaaagagaaataagcaagaatatcgggctgggcacagtggctcatgcctgtaatcccagcactttgggaggctgaggcgggcagatcacttgaggtcaggagttcgagaccagcctgggcaatacggtgaaacccagtctctactaaaaacacaaaaattagctaggcatagtggtgcatgactgtaatcccagctagttaggaggctgaggcaggagaatcgcttgaacccaggaggtggaggttgcagtgagattgtgccactgcactccagcctgggtgacagagcgagactccatctaagaaaaaaaaaatcagaaaatattctgaaacaaagagaaagtaatgggtgatatgagtcctaccaggcattgaagtgcattataaagcctttacctacctcatggatctaataaagcaagaaaggaaaagcctctcctcacgtggcatcccctcccttggttgtgtcaatttgaatcacactgatatgccttatgcggaatctacataaaaagaaaccttttaggcacacaccgaggaaggggctgaatgagggtagctgcggatcattcactggtatcagggacaagaaaattaccatggcctcaggaactgccagtaaagacacaggaaggttctggttcccagaaaaataaagtcagaagccaagcccagggtgggaacaaagaagatcagaaaaaatcagaccatttcataaaagctgtgatgcagaagaagtccagtggaggagggcccaagtgccacacaggttccaggtgatgctgaaattgtctcgggtaactgagatacctcagacccgcctagacagttagaaatggctagaaagagaaaaggaaatttttttctagacaccaaggagaaaataggaagaaaagcaatatgagtggatgggagaggttgccccatattcaggataccatttaactgattttcccgggcaaagcactaggagtcatctcccaaggaatttatagtccagttaaagaccaaaagggctttaaataataattttttttttttgagatggagtcttgctctgtcacccaggctggagtgcagtggcacaatcttggctcactgcaacctccgcctcctgggttcaagcgattctcctgcctcagcctccttagtagctgggactacaggcatgcaccaccacgcccagctaatttttgtatttttagtagagacagggtttcaccatgttggccaggctgttcttgaactcttgaccttaggtgatccacccgcctcggcctcccaaagtgctgggactataggcgtgagccacttcaccaggccaataataaatttttaaataataaagcagtttaaaatgggactggatgatacaagccagttgctgctggagctagaaggaaggaggctgacttctgatgggaagatatggaaggatttcagagaaaaggatgcatcagagccagaactccacagaagagaagcagggtcaagaaattcagggctgagagaactactcaagcagaccttcagcaaggcaattaaaggaggacaagtggtcctgcagggcttcgcccagggaaatgcaaagagaaagagagagagagagaaagaggcatcactggaaatgtttcacagataccttgactgtaaacattaactgcaggcactgaaatctagccattaaggaagcattgaatgcttttaaagggtggggagacaggaaccattctgcagcaactgtgcaatagtttctccttaaattcatgattcacatctttagagaaaatgttcctaacgcctaagagaagaccatacaaacagattagctgttttcttcctctgtctgaagtgctatgccatgtgatgcctcaaattgctacagctgtcaacaccagcttgggtagggcagagtggaaacagggaagaaacgaggtctgtgaagatataaatataccattgaatgtaccctgacccgaagaggatcctccagtattcaaaacaccctttccagcgcccaccctctcctccagctcctgcccactcctctgctccccgcagggtaaaactcagaaatgttgtcgctactccctcaccttccattccctcttcaatttgcttctgcccccattaatccattgaaactgctctcctcaagtccccaaaaacctccacgtcaccaaatccagtgagcactatcctgtcttcacatgacttggcctctcagtagctggctctgccttcttgaaacaccctcctctcagcttccagaaccctcttatttcactggctgtcccttttcagtctcttcctctggttcaaagtgtggtctctggcccagcagcatcagcatcacctaggcacttgttagaaatgcaggttcctggaccccatcccagacctgctgaatcaaatctctggtccgggaggggcgaggcagcaatctgtgttttagccaagtcttccaggtgatgcacactagagactgagaaggactaatccgaaactgtgggcattcctcattacgaaatcctgattcctttctcttccctggctacattttctcccatgatgatgtcatctaagcccgtgactggaaatcatctatactctgacagcttctaaatgtgtatcttcagcacccatctggggattacacagccatctcaaattcaacatgtccaaatggaaggaaggaactccagatgttccctctaaaatctggtcgccatccatttttttccatttaagaaaatagctccaccattcccccagctgtttattaaaaaaacttaagtcatccacgagtcctccttttccccaactccttaccctattagcaatagtatatctagagggtctatctctaaattgtcatgaatctgtcctctattaccactataggccaagccacaattttctctccccagcccactgcaaaagcctccagccaggtactgctcatgcccacaaaacaaccagagtggacttttaagaaggtaaatcaggctaagcatggtggctcacacctgtgatcccagcaatttgagaggccgagataagcagattgcttgagctcaagagttcaaaaccaacctggacaacatagtgagacccccgtctctaaaacaaatacaaaaatcagccaggcatggtggctcacgcctgtggtcccagctactcagaagactgaggtaagaggatagcttaagcccaggaggcagaggttgtagtgagccgagatcaccccacggcactccagcctgggcaacagagtgagaccctatctaaaaaaaaagaagaaggtaaatcatgtcgcatcattccccttcttaaatcttcaagggcttcctatcatatttaattattaaaacccaaacatctgtcatgggctgtcaggccctatggtcactgtctgtatggcttcctgtatcctctttgaggtctgaagtcagagactgtaactatttaattcacactaagtgctcaataaagtggaggaaataattctccttttgtgagaagatgaatttagagtctaacttctttagtttctccttacttgctgaggaggatctatatgatgtggtcaaatcactttcagccaggacacaggagatgggaagggagacttccaaagaatgacttgatgatgctgtgaacctcagcacaatagggctctgtgggcaaacacagtagggtttgacctccaaggacaaaccctacaccccactccccacccagtccggaaaacgactttcactgtttatagtgagatatgggtggttgtggtcatgggagaggcaatgggagtgagtttggaatgaggaattatgcagggccatttgaatagccacttcctgtgggttgcccacccttggagtggttcataaggtcaataaaaacctctaagaatccataggccagaccatcaaccccattgtggcagcttttaaaactggcaacaaggtctttgatactcttcccattgaggagtgggctccatgtcctctgtccttgaatctgggggctatatgactttttttttttcttttctgagacagagtctcgctctgtcgcccaggctgaagtgcaatggtgccatcttggctcactgcaacctctgcctcccgggttcaagcgattctcctgcctcaccctcctgagtagctgagattacaggtgcgcatcaccatgcctggctaatttttgtatttttaatggagacggggtttcaccatgttgcccaggctggtcttgaactcctgacctcaagtaatccatgggcctcggcctcccaaagtgctgggattacaggcatgagccaccgcgcccggcaatggggctatataactgttacgtcaacagcatacagtggaagtgatgctacctgactactgagcccaggcaggaagtggcattgcagcttcttgtttgctgaaactctcacacttggagtcctgagccaacatgtaagaagttcatccaagccgagaccaccagaccatgaggaaaccaggccacacagagaagccgcagctaggcaccgcaatcagcacatctgatcttcaagtcctcctagcccaggtgccactcaggcaagtgcataggcttcagatgactgcaacccccggctatcaaggtacccctagacttagagtcttctcaactgacaccccaaacataatggggcagaatcaagtccccgctgtgcctgtccagctccctggcttaaacaatccattggcataataaaatggtagttgttttaaaccacctaagttgtggggtatttgcagcacatcagtaataaccagaataggtcataagtcaatcccctttggttccctagttctttccctccaagaaatcccaggccatttgagccctttcctgatgggaggaaagcagtcgaccagaaaatacaattcttttgaggaaaagatgggttttagcgtcttggaaccaagcttcacagagcgccttctgccagtgggcagccagccccttgcctaggctgatctggtcacctacttccagccccaccccagctctgtcctcccacccagctctgtcctccctgcaggccctgagcctctaggagactcaaagagacactgtgctgcccgctgaattcatctcccagtgagccatctctgaggaaaggaggtaaggctctgaatgcgatgtcaacctaagcattacataacactgataggttgtaaaatggcctcgctgcctagtgctcattctaactggccacaatccagtcctccctgttgcactgagtcagctccctccaaaggcggcgctttccaggcctcctggttgccctttcccagcagacctttcaagtgctcacccacactcacataaacatggcccaggcactgtttacagcagctctcctctgtgcattctcctggcttctcctgtctctcgccatttgtacccctcccctgcaacttgagtgacagtgattggtcctgagatgcaaatatttgatgcacatatgtttacaatgcagcctcagcttttttttttttttttgtaaagagacaaagagtgagacagggtcttggcctatagccctgtggcccaggctggagtgcagtggcacaattaaagctcactgcagcctctacctcctgggctcaagcaatcctcccatctcagcctccccagtagctgggactacaggactgtgccaccgttcccagcaattttttttattttttgtagaaatggggtctcactatgttgctcactctggtctcaaactcctgagctcaagcaatcttcctgccttggcctctgaaagtgctgggattacaggcctgagccactgcacctggctgtcaacattcttaaatctctttccttacatgcttcctaaacctctcacccaaaactaggagactagatgtcctattttccccagggcatgcctggtttacgcccatttcactttaaaagtgcccaatttgggtaataatttataagatccccctccctctaaatcctgtccttctatcacttcatccttcgctctcctttaaaatgagacagttgtcagcaggaatcctgcgcaagaacacaccaccctgtttcatagaagatatctcaggtaatgtgcaaacacgggtttttaaacggagcgcatttttctcatttgttaatatcaccacctaaatcatctcttgcctaaaacaaggagtagaaagtgaatgaaggaaggaacaggtgatggtcagtgtcctttctacgcctcaaaatttaagagtttatgtgaaaattcataaatattaatctcaatccaggttaagcaaaattttttgctctcctctttagaaatttctggttgccaaagttccagaaattgcttcctcattcctgagcctttcattttctcgatttctccattatgtaacggggagctggagctttgggccgaatttccaattaaagatgatttttacagtcaatgagccacgtcagggagcgatggcacccgcaggcggtatcaactgatgcaagtgttcaagcgaatctcaactcgttttttccggtgactcattcccggccctgcttggcagcgctgcaccctttaacttaaacctcggccggccgcccgccgggggcacagagtgtgcgccgggccgcgcggcaattggtccccgcgccgacctccgcccgcgagcgccgccgcttcccttccccgccccgcgtccctccccctcggccccgcgcgtcgcctgtcctccgagccagtcgctgacagccgcggcgccgcgagcttctcctctcctcacgaccgaggcaggtaaacgcccggggtgggaggaacgcgggcgggggcaggggagccgcgggggccgagtgaggaccccgggcctcgggtcccaggcgcaagggtgcccggccgggcggggtcgggaccccagtgaggaggggccgggggctgccccgcgggcgcgtgacgcgtctcgggcctgcccggctgcgctggtctccgctcgggtgaggcggcttggcttcgcttttcaggttaggaaagctccctttactgcgcgttggggggctgggggagctggcggagccccgttagggaggtcggtggcgccggggtgtctcagcgccccctgcaccccgcgcgggtccggcccagcgggcgatcgctggcgcccagggaactccgggagggccgccagcgggctccgcagggcgcggggcggggaggggcgcctgggggccgcggggctcgcgctccccgcccgttggccgcccctcggaggccgagatcggggcccagaacgccccttggcaaggcctggcgcttccgcgatgcccagagggtgcttggggggatggagagaggggcgcccgccgggggagttccgggagcctcggtgcctcccgccgcagctgcagcgttcctcccgggaggcggcccagcccttcatcctcgccgcctgagcttctccgaggggggctgcagccttgcggccgttgccaccgcctggagaagcggcccacgcggactgacgggcgggggcggggcctcgggcctcggcgggggcggggtccggggaggccccaccctctgttctccaggggcggggagagaggagctgcaggtctgcggcctggccccaggtgcgatggcggaccccagcttggccagtcacattcctcccagtccccctggagggagaacgctggccatggggggctccaaggaacaaccagcctcggatgacgacccttgggtcaccggtctccccacctgtgcggcaggcgccttcacgtttcattattaaacaatggggagaaatccatgtttactgtcctttttaaggaattttttgctcttctctttgaggtggctgtaggaaatagattttttttttaacctcgcaattccaccacggtcacatccatcctcgccatcgcagagccacagctctccgtttttgtttcctagcctccagattctcacacaacacagtgcagtttcactgctgtaatgatgaggatcttcatggccgcgttattttcttgttctgagagcatcacggtttaattagcagttccccatatgatttgaagtgtttcccgtttccttagggaaaactcctggtagaataggattaaggatttttacaaatataattatcaaaaacataggaacagggaattggataaatatgttaaacttctggaaaaatcaacaacgctcttagatttgtagaagaaaggaaaaaatcaccagtggaaaggagcaattttacttacacaaacacagagaaggtcttacagtgaaaaaaagctaaccagtaaggggaaaagcaggcagaggggtaggatgtgatttgtatgttatttatatctaacacaagtcttccacaccgaaaggaaaatattaagattataatagataaatggcaaaatgatgagtcatttacacaataaaatgcaaattagagcatgtttgggttatcattttacatctattaaaataaccaaaataattaatagtaacagcaacccttgctggaaggttgcccaaaacttggcattttcaagtgtctggggaggtggcagggctttggggtcacaaagatggttctgcagtcaattttgtgaccttggacaggctacctaatttcctgatcctccttttgtccattcatagaatggaggaaatgatagctactttctgcgtctgtatgtatgagttattgggggcatttcgaaccagtgacaaacattttgttaagcaatctggtgatgcattaagaagctggaagctgtgacccagaaaccccactcctgagaacttacctgcaatggaagaaacaaacaaacaaaaacaggcatgtattcctagcagaatgatctaaaattagaacacctggaaaagagcctaaatgtataacaccagggcagtagctaagaaaattatgacacattaactgaaatgaacattatgtaaccactaaaaatcatgattttggagcctgtgatatgtggggaaaaactgacaagtaaaaaagtgggttattaactgcacctgcttactctaacgtgaacgcatatgtgaaaaatctgaaaggaaaagcacagaaaatggacgttttcattgaaattgtcggtgatcttaattttcctttggtgaatatattgctctcactaagggcgtttaaaaaatagttcacaggttttaattttttagatgaaatggacccacagttttctgtaagagaaaggagagattgttatatttgctacttagaataaaagatttttagccaacgttgtttcctttttcaaatatttttccatttttttagttgattaatgatttagtaatttgtgtattgggtttttttaagaatcagttcttagattcatttatcaattctagttttttgttgttgtttttaaggactcctgaatatttttcaaaactgaacaatttcagccatgtctgagctttccgtcttcctggaggcacaaatctagtttagctgaaccacaacagattgtacatatcctgcagaacctctgtggtcttaggaaggttgaaagtcaccaaatgtcacagaaaatgagggtcaggaaaggctgtgatcacaagctcttgatccagaggccactcgggtgcatctgtgtgactgacacctcattgcatcatcatttcttgtaaaatcagcttaattttgcagagaaatggccacagatttttagaattatgctgaattatgtaagggagcagccattttaaaaataatgtaatcaaataacaataataacataacagaagtttctgcaccacactgacactgaacatggctgtcaaccaactagccaaaccaaggtgaaagattctctgaacttcagttttaacttacttcgtccattctcccttttcagatcttatttcttcttccaaggcaactatatccactgtgaactgctgcatattaaacattcaaaacatgtctgtatctaacccagtgatggctacagcattataaaataactcctaagtgaatagtgtgtgcagcaattctcacagctaggagaattttttttgtcgatgtgttaaccattcctttttctccaactgcattctacttaaactgttacagtattgtgtgatcactttaagggaggtaatccttcagtgaaaagcattataaatgttgaagattagacccctgaggacctagcactgaagcctgatcacgggtgccaattccctgagaagcttttatagattcccaaatcccatcgctaggcactctctgactggcttgtgatgggttccagcaatgttgttttttaaaagctcctcaggtaattctgatcatggaccaggttggggaccctttgctctgttcagtttgtggtttctaggtgccagtgagaaacccctacccccaatttttgtgcaaaatttttttcagcttacatcaagttctttatgaacctcagaaaattaaaatataacaagggaatttacttagctcagaagagacaagggacattatggggtgaaggtcgggggttgtttgacatttgccccttcccgatgtaactaattaagcttcaagttgtaatgtgttttatgggctagaaggctttagtgcctatatttggatctcagctccaacaccttggactcttacaaccttgggataagttcttactagctctgactctcactccccatctataaatgggaataagatgaacggggtaatttatagattttttagtaccctctctctagttccgctgttttgccattctgctcatgcaccaatgccatgtgatcttattgtagctttgcactctgacacctggcaggtcaagtgcacccttgattatcttctcattaaaaattttcttcagtcttttaagttttgagtataatttcataatgtcttttaaaatctcttttgaattctttttcaaatttatttattttttctttgacagataagattatatgtattgtgtacaaaattagaaagagatcttttcctctaagatctgaaacaagacaagaatgctcacacgcactagttctattcaacatatggtactgcaagtcctagccaggacagttagacaagagaaagaaataaaaagcatccaaatttgaaaggaaaaagttaaattgttcctatttggagacgacatgattttacacttataaaaccctaaagactccaccagaaaaccattagaactaataaattcagtaaagttgcaggatacaaaattaacatacaaaaatcagtagtgtttctatatgccaacagtgaactatcaggaaagaaataaaaagaaagtgccatttacaatagctacaaaataaatatttcagaataaatttagccaagaaggtgaaagatctctacactgaaaactataaaacactgatgaaagaaattcaaggagacacaaatagaaagatagcctgtgctcatggggggataattaatgttgttaaaatgtccatactacccaaagtgacctacagattccatagaatccctatcaaaataccaatgacattcttcacagaaatagaaaaaacaatcctaaaattgggtgaaggtggcatctttgtctcgtttcagatctaagaggaaaagctctcaatttttcaccattaagtatgatgttagctgtgaccttgtcatatgtggcctttattgtgttgaggtacaatgcttctacacctaattcattgagagtttttatcatgaaagaatgttgaattttgtcaaacgctttttctgcatctattgaaatgatcgtatggttattgtctcactctgttactgtgatgtatcacacttattgatttgtgtatgttgaaccatccttgcagccctgggatgaatcccactgtatcatagtaaatgatctttttaatgagctgttgaatttgcttcgctagaattttgttaagaatttttgcacctatgttcatcagggatattggcctatactgccattttcttgtgtgtttttgtgggactttgacatcaggataatgctggtttctcctgttattaatttctagttttataccatcatgcttagaaaaaaaacttgatacgatttcagtctaattaagtttgttaagacttgttttatggcctaacatatgatctgtcttggagcatgctccatgtgctgttgagaagaatgtgtattctgcagctgttggatggaatgtcctgtatttgtctgtttggatccatttggtctaagtgaagtgtaagtctgatgcctccttatttattttctttctaaatctcccgtccaaaaatctaagagatccaaagcaaacagggggttataaaattacctttgaattctgactgaaattgtgtttactttgtagattatttgctggtgacttggtatctttcaatattggtttcccaaacaaaaaacattgtatgtctttctctttttccagtcttcttttatgtctcagtaaaattttgtagcttgcctactacttattttcaggttaaatcctagatattttcaattcttactgccattatgaatgaatgtttttccccatgaaatgtttaactacagctgatttagggactcactgagttttgatttgttgatttgaaaaactaccaccctgttgagctcatgtatttattctaagacattttttgagattttccaggtaaaaaaattatacctagatgaatttatagaacaacctaatagcataaaagcaatagattattgttcaccacattaatgggaatgcctttcctcttaaaattatgatatcttgggctttgtgtttgtgacagcatttctttatgatggaaagagactatccttccagttctatagaaacgttttaaaaatagcttacatttttaaaaatttaggaatgatattgattttcattgaaaacttttcaacatctgaagaaaatcttttcttcctaacctattaatagagctcctgattttcaaccattcttgtattcctaaaataatccatattggtcataatgtattcttcttttactaaactgttaaaataagttgggtgctgtttttttagattttggcacctgtgtgagaggagggtgccatggcagggtggctaagtgtgcccacctgtgtactagcattgaattttgaccctttatcccattggctctaaacactacatctcaggtgaagacgcccaaatgtttatctctactgagttacagattcctataacaattgcttaaattgatactcccacttgaatgtctcataggtgtggcaaagtttacatgtctatactgaaactcttggttttctctcccaggcatgaccctccaccagtttgtcctatttcagtagatggcatcaccgccatctccctggttatggaagtcccagacccgggcaactctcactcctccatccactcaaccagcaggtcttattggctctttctgtaaaatatgtctcatttattcacagcctgctagctgcatggactccatcccaggccacgccaccatcttcctgcagcagtttcttaactggcctctccattccctttcttgtcccactaaattttcttctatttaagaaaaaatgttttgtagacatggggtttcaccatgttgcccaggctggtctcaaactcctgggctcaagcaatcctcctgcctgagcttcccaaagtgctgggattataggcttgagctgagcttttgaaaaaacattctatgatgttactgtcctactaagaccctttaatggctccccactgctttcagaggaaaatagaaatttctctctgtggaccatgaggccctcatgatctgaccctcaccacctccctagtcttagcagtccacctgccactgtctcatggggctccacagatttgatctcctttttggtccttaagcccaccaagctaagtatcttattcaaaactgtgtcctcagcccctagcacaattcttgacccttagaattctgacacttgaaatgtgtgttaagctaatcaataaattattgtgccaggcttggtggcacaataatgtgttgtgggtcacctatatatagctgtggctcacacctataatcccagcactttgggaggctgaggcctgcagattggttgagcccaggaatttgagaccagcctgggcaacatggcaagaccccatcactattaaaaatacaaaaaaaaaaaaaaccaggcgtggtgttgcatacctgtggtcccagctactcaggaggatcacttgagcccactgggtggaggttgcagagagctgagatcatgccactacactttggcctgggtaagaccctgtctcaagaaaaaaaaaaaaaggttatggtactgtaaatattatattacagtgtataatttttgacagctttttttctccatttcttctatggttattggtcagttctagccttctatttttttttttaagctgacacatactggctgggcatggtggctcacacctgtaatctcagcactttgggaggccaagacaggaagatctcttgagcccagaagtttgaggcgagcctgggcaacatagcaagaccccatctctaccagaaaagaaacaacaacaaaaagaaactggcacatactagttattccataaatatttcttaaatgaattaattctaaagttgatttttataatttacatcttaatagaaagacaatccatctcagagatatttttattcattaaggaaagttgcataaagtaatttattaaccttttaaagcattctctaagcctatttccccttatagagatatgttttctagtgatgtgtgtatgttacattttcaaataactcttaattttatttagaaattccacatttttgtgggttttatttattaaattcgattttcatctctattattaatttatgacagtttattttgaagttttctgttttcttccttttgagttgaataatcatttactttattttacttcttctattcagttgtattatccatgttcctctgatagccatgcaggttccaaatcctcacatttttcaacttctttaaaagattttttttgtgctatcctgataagcgttaagtgttatatcattttttttcatttttattatattcttaatgattttgattctctttttctatccttttggttttctttcttaggtaaatgatcagttatatcttttggccatttttttctgttggaattactgtctcttactgctctgtaagaattccttgcaagttctagaaatgaatcctctgttgattttaagtactaaagtcccctttaccattgtgtactctttctattaactttgtccagagtcagctttatcgtgctgaacaagaatctttacattttaatttttttttttaatttttaagttcaagggtacaagtgcaggtttgttccataggtaaactcgtgtcatgggggtttgtcatacagattatttcatcactcaggtactaagcctagtacccattagttatttttcctgatcctctccctcccttagccctccgataggccctagtatgtgttgttcctctgcatgcgtccatgtgttcttatcatttaggtcccacttataaatgagaacatgtagaattgggttttctgttcctgtgtcagtttgcatatccctgcaaagaacatgatctcgttcttttctggggctgcatagtattcgatagcatatatgtaccacactttcattatcccagctatcactgatgggcatttaggttgattccatgtctttgctattgtggatagttttgcaatgaacatacacgtgcatgtgtctttgtaataggatgatttatattcctttgggtatatacctagtaatgggattgctgagtcgaatgatatttccgtctttaggtttttgaggatgtaatcaaattcatcaattatttgccttatggtttgtgctttttgtttaaaaagttcttcccccattcctcctccaggtcacaaagacatttcccaatattttcctcttctagcgccaaacttgtacctttcacatgtaagtcttggatccatctagagttcacttttgtatgtagttagggatctagttttctttttcttgtttcccagaagcatgaaaccttcctcctttattggttcgtggtgcccatgtcagcacacatcaagtccctgttaaagtgtatctacgtgggtttctctctcaacttgcttttctgtttcctttggtctctccgtctattcctgagctttaccgtccagtcttcgtcactgtggttttgtagtgatttcatgtctgctttggcagattccctcctctttacactttttttttaaggttgaccttattattcatggacattttcttccccatagaagtttactgaacttctcaaaaaattgagattacctggaattttaactggcattttattgcaactaccagttcatttaggataatggacatctttataatactgagttatcgccatcaagaccatggaatgcctctccatttttttcagaccatcttctgtgttctctgtataatgtgtcacccatcagaagtcttttcttagttaagtcaattcctagacgctttacagtttggttgttactttgaatatctgtattttcttctggtcagttattgctactgtagaggaatgccgttggttttcgtaggctgaccttcagtcccacaaccttgcactctagcgttggttctcatgttatccctgttattctgttggattttctatgtgcatgatcacactaattgcaaatagtgtcagctagagcactttccttgccattcttacacctgttacttctttgcatatggccttggacagcaccttgagtcccatgacaatggatgtccctgttgtatttctgagtgtattcttagcattcttcttagtaataaacaggtattgaccattaccatatacttaataggatatcttgaaatatgccagaggactaggccactacttgactggtgacagagagtatcttagatgtataggcccccagacatgccagtgtcctctctcaccacccatctccactccaaagttgtctggcctcacccaccttctgtgcctggttcttctcctctgtgcttctctcactatgccatgtcctcgcctgttcaggtgtctctaagagctcatagatccttaactcttacagctttaaatgaggcacattcaaagcccgactcagtgtcattccctgcagtctcctcttcctcccatcttacccatttcaggtaatatctccagccagccagagtctactgcagtagctggcacatgaaataaatgtttatttaactgaattgaaaatgttagctggccattgtcaaaaatactattttgtaaatttataaatatggttctctttgtatatccattataaatatttagtatttagtttgattattccttatgctttataacatgtgttttcccattcattcatttatccagcatttattttgcatgtctatgggtcaagcgctctgtctaggaacactgctgtgaacaaaaccaaactcccgccctaaaggagcctgcactcccgtggagaacatgaataataagcacagaggaaataacataatatctcaagtagctgtaactgctccagagaataatgaagccaggaaagggggtgggctagggggtgctgttttaggtagagtgatgggaacagccccactgagcaaactttagccacatgagtagctggaagaaaagccttctaggaccagggaacagcaagtgcaacagccctgagacaggatgggcttgtcagtttgaggagcagtgggaggcctgaaccaggttacatggggcccagccagtatggccacgactttgtgttttatccagagtacaaaggagcctcactgagggacaagggaagtggcatgatgtgacccgcatattaagaggagagcgctcaatggcagccaggggaggagcagggaggctggttgggaggctgttgaagaaatcaggtgagaagtgatggaagcaccgaataagatggtcatgttggaaaaattgagaagctgaggtgcttagcattgattttcaaggtagagctactgagatttgctgatagatccaatgtatgctgggagagaaaattcagtcactctagagcattggctggatttgtcacccattgcagcgaatggagaaggtgctgacataaaagccctttagactgaaagctactgactgaggggatggtgccctagtttgatttcctggggtgtatgagtagcagggaggccaagagctgggcctcacgagattgtggggactacatcagggaagcaggcctgcaaagaacctgcaccacagacccccacctaaaagagcctccaaaaaccctaactggcatgacctgagtactttaactctgcttgtaactttcaaatatattttgatttgcttatgaccaccaaggcaaaacttcccatttcaataatgttagtagaaacataaacaggatgttaatttatttatttggtaattctttttatgaatattatccagtttaatcattagctctgaaggagatgaaaaataattttctaatttttagaaaaatttgcagctaattgggtgataaaggtaaggggtttctgagttcacaaaaatgttctaaaattggcaacagtttcggttgcacgtttcattaaatgtactaaaaaccattgaactgtacatggtatatggtgaattatatggtatgtgaattatatctcaacaagctgggtattgtttttttaaaaaataaaaataaaaaaggagaaagagagagagaaaaacaattgcagatcatcccagcactgaggacaagactaacttcagtgttccagtatatgccattataggttttacggcacacagtgatgatttggagcctatgatttgacctagggtacagcaggtactgtttagcaatcattttactattgtcataggtctctgctcttggagctaagtgcccagggtaaatgagatctttaatttgaaaagagatttttgatttgatgaatgtacattctccaaagggtcataaattgtcattctggatgtttgatctgtttgttgttttggtacaaaaattagaagaaaataattcactcataaaatgttaaataatgaactaaaagtcattcatcaagtccataacttagggtcacatttgtccttggagcaggagaaagagttgtgttcacccttttcttacttttgcttttgtcctaagtgcttcagagaagtacagggtggcaacagtgtttctactgagcagctgataccattgctatgcactcattcattatgcaggaaacatttagtaatttcaacataaatatgggactctgacgttctcctcttcattttgcagagcagtcattatggcgaaccttggctgctggatgctggttctctttgtggccacatggagtgacctgggcctctgcaagaagcgcccgaagcctggaggatggaacactgggggcagccgatacccggggcagggcagccctggaggcaaccgctacccacctcagggcggtggtggctgggggcagcctcatggtggtggctgggggcagcctcatggtggtggctgggggcagccccatggtggtggctggggacagcctcatggtggtggctggggtcaaggaggtggcacccacagtcagtggaacaagccgagtaagccaaaaaccaacatgaagcacatggctggtgctgcagcagctggggcagtggtggggggccttggcggctacatgctgggaagtgccatgagcaggcccatcatacatttcggcagtgactatgaggaccgttactatcgtgaaaacatgcaccgttaccccaaccaagtgtactacaggcccatggatgagtacagcaaccagaacaactttgtgcacgactgcgtcaatatcacaatcaagcagcacacggtcaccacaaccaccaagggggagaacttcaccgagaccgacgttaagatgatggagcgcgtggttgagcagatgtgtatcacccagtacgagagggaatctcaggcctattaccagagaggatcgagcatggtcctcttctcctctccacctgtgatcctcctgatctctttcctcatcttcctgatagtgggatgaggaaggtcttcctgttttcaccatctttctaatctttttccagcttgagggaggcggtatccacctgcagcccttttagtggtggtgtctcactctttcttctctctttgtcccggataggctaatcaatacccttggcactgatgggcactggaaaacatagagtagacctgagatgctggtcaagccccctttgattgagttcatcatgagccgttgctaatgccaggccagtaaaagtataacagcaaataaccattggttaatctggacttatttttggacttagtgcaacaggttgaggctaaaacaaatctcagaacagtctgaaatacctttgcctggatacctctggctccttcagcagctagagctcagtatactaatgccctatcttagtagagatttcatagctatttagagatattttccattttaagaaaacccgacaacatttctgccaggtttgttaggaggccacatgatacttattcaaaaaaatcctagagattcttagctcttgggatgcaggctcagcccgctggagcatgagctctgtgtgtaccgagaactggggtgatgttttacttttcacagtatgggctacacagcagctgttcaacaagagtaaatattgtcacaacactgaacctctggctagaggacatattcacagtgaacataactgtaacatatatgaaaggcttctgggacttgaaatcaaatgtttgggaatggtgcccttggaggcaacctcccattttagatgtttaaaggaccctatatgtggcattcctttctttaaactataggtaattaaggcagctgaaaagtaaattgccttctagacactgaaggcaaatctcctttgtccatttacctggaaaccagaatgattttgacatacaggagagctgcagttgtgaaagcaccatcatcatagaggatgatgtaattaaaaaatggtcagtgtgcaaagaaaagaactgcttgcatttctttatttctgtctcataattgtcaaaaaccagaattaggtcaagttcatagtttctgtaattggcttttgaatcaaagaatagggagacaatctaaaaaatatcttaggttggagatgacagaaatatgattgatttgaagtggaaaaagaaattctgttaatgttaattaaagtaaaattattccctgaattgtttgatattgtcacctagcagatatgtattacttttctgcaatgttattattggcttgcactttgtgagtattctatgtaaaaatatatatgtatataaaatatatattgcataggacagacttaggagttttgtttagagcagttaacatctgaagtgtctaatgcattaacttttgtaaggtactgaatacttaatatgtgggaaacccttttgcgtggtccttaggcttacaatgtgcactgaatcgtttcatgtaagaatccaaagtggacaccattaacaggtctttgaaatatgcatgtactttatattttctatatttgtaactttgcatgttcttgttttgttatataaaaaaattgtaaatgtttaatatctgactgaaattaaacgagcgaagatgagcaccacctcccgtgtctgcagttgtatttcctggtgcttgccctgtgttggggactgttttgggggttaatctgagccaagtggcgctttctgtcctcccttctcaagtgatggccgatggttcacgcacttccccctgttcctgcccttgtcctcacttcccagtcacccactagttcatctctgcggcttttgcattttctccacaagcatctaagtgggcttagcactggtaaactgcaaaggcactattgcagcaggaggaacagtctgggagcttttttcagtcctggatttagaaatagattttcttgattaaaatgaaaattaacaagctctaaagaactgttgacccttgaactacacagggattagaggcactgacctgccgcacagtcgaaaatctgcagagaagttttttttgttttgttttgttttttttgagacggagtctcgctctgtcgcccaggctggagtgcagtggcgggatctcggctcactgcaacctccgcctcccgggttcaggcgattctcctgcctcagcctcctgagtagctgggactacaggcatatgccaccatgcccggctaatttttgtatttttagtagagatggagtttcaccatattggccaggctgttctcaaactcggcctcaagtgatctgctcgcctcagccacccaaagtgctaggattacaagcatgagccaccgcgcccggcctgcatagaacttttaactcccccaaaacttaattgctaatagattaattgcctgctgttggctggaagccttaccaataacgtaaacagttggttagcacatatttcacatgtcatatatactatatactgtattcttaccataaagtaagttagagaaaatgttgttaaaacaatgaggaaggaaaagtatatttactattcactgactggaagtggatcatcataaagatcttcatctcatcttcctcacattgaggaaggctgaggaggaaggggaggggttggtcttgctgtctcctgggtggcagaggcagaagaaaatctgtgtctcgtggactcagttccaacccgtggtgttcaagggtcacctgtgcctgctttatgcaccccaaatcaggctctaaaatagtctcaggtcctgtgagccttagtgacacactcttctcagattcaatacctttgatctgaaaggtgactttgatttgtcataatcttccaactcattctctacatgtttcgacgcaccagcactgtgatgttcttggttatccttggcagaagttttctcctgcaactaatttgctaaaggcagggggtaatcagaagtgacagtggttgaaatcacaggccaatatcttagcaaacgtctgtgttgtaaatggggaagtgcctctggtggggtcttcaaggatcactccagcctggctagggaaactctaggggagaggcacttgaaattattgtactcataggtcctagagagggaggcatgtcatgccaagcagggggctggattggaggcgtgcccagggattgggtgcaactcagcgtgtatgagacagaaagagagagaactcctgggcaagtgcctttactgggagccaggatggaggacacaagcacaaggtgtaaggggatctcactggtgtgtttgaatgtcactaagtcacagtcaggggaagacaagaagtggaacttgtggcagggaccagccttattacactggcacctggttacctggacagggtgcccactgcctatttgtaggatgtcaaggtatcaggaaaatatgaagtttttaaaaatttacaatataatgccaacctcctacggtgatcagaggatcagctttgtattaaagatggaaagataccaatcatcacccacaaaactactaaaacagaaagaatgacaaatacaattctcggccaggcacagttgctcacgcctgtaatccctgcactttgggaggccgaggcaggcagatcacttgaggtcaggagttcaagaccagcctggccaacatggtgaaacccccattccctactaaaattacaaaaaattagctgggtgtggtcgcacgtgcctgtaatcccagctactcaggaggctgaggcaggagaatcgcttataaccgggaggcagaggctgcagtgagccgagatcccgccattgcactccagcctggcggtaagagcgaaactccgtctcaaaaaaataaaataaaataaacttttcattacctgcctataataatttctcaaaaagagtcaactgaggagacttaaagtgttcgaagcatagctacttgtaggaccagagtgaataatatccacctgtatctttcccaggcctcatgtttcctttgttatttcaaacgtgtgagtcatgcaaaaggaatttttactaaaaaggaaaagaaaaaaatttaaaatgaccagcataaacataattgagttcaatcccccagaaagggttattcggagaacagccaggcgctgcccttgtttttccccctccccatctggggctaagaccaaaaggggtctgtctttggagggaaatctgggtctgtacagcttcccactctaaggggagccttaatcccagccggaacctgagcttctccaggcaaggcctgaccttgccgactgatctaagcattctgcgcttcattttcaccccagaaaggtgacttcctcctggctggggggctcctcccctaggactcagctcatcctgaactaataaccgcgttatgtccatcctttgttccgttctttgagtcccacccatgttcttcaggaaagctgcagctggtccacgtgccttgcctgtgcttctgtagaactacccctcccttctctgcctgcagcagggctcctggaacttgaatgtgcacttgaatctgcaggtcctgactgtaggtctgtgtttctaacatgctgctgggtgacgctgtgcccgtcctgtggtcggcattgtaacaaggctccgcgggttcccacgccggagtctgcgtcagaaacctctggagggcttgttatacacagatggctgaaccccatccccagagtttctgattccctagtaccagggtggggtctgagaatttgcatttctaacaaattcccaggtgatactgatgctgctggtgcggagaggtcacatggaaaccactgctcggcagatgcaaaagaagcagaagccgccccaaccctgaaatactcacaaagctgctgtggagaccagacacctgccgggggaatgagagcctggggatcctgcctgggaggaagagagagctgggagctctatgggtgaatgccaatggaggtgcaaggaggtgactaactcctgccgtctgaaaatagtgaagcacagccgaggcctgaagcccacccttagtgagagatatagttaaacttggaaatggtgcccagtcacttgaaaacagcacttctcagattcagatgtacacatgaaccacctgaggatcttattaaaatgtgggttctgaggctgtagctctgaggtgagctcagagattctgcagttctagaagcttccaggtgatgcaatgctgctggtgcaaggaccgctctctgagaaacaaggacctagaggtccaggtcatcttggagagctgttctaaccctggccaagagcttcgggaggcactggggctcaggcacccggcaggggagtcttcactttccttgtctgaactctaagtgctgcctctcacacacaattcccttgtctggacccagacaacagaatcagtgcagcggcttatctcagaactaaagacagttgactgcccctggggaagggagggctctctctgaggaagtctcaaacaccctgctgcaaaattttcaccctcaggatccccaatttccctgaaccttaacagacttgcttgttctgtagaaattgcctgtaatttccaagataaaaggactagaaaggtggccttttcacctatgtggcttctcttttttttttttcttttgagataggatcttgctatattgcccaggctggtctcaaattcctgggctcaagcaatcctcccatctcagcctcccaagtggctgagatgacaggcacgtgccactatgtctggccctatgtggcttctccaaggtgaatatgggccttgtggggctccaggtggcacatgtaaggtgtgtatagtagttttgtgttcagacttaaatgagactcaaaattatactggggaattctcaggggcagacccctccaaaatcaaagacctgtggggcaaagccccagcatcctgccccaatgagctggggctgactccgacagctgctgcttctgggtctatcatctcctgatgctttgacaggccaaagcattagcctcaggttagcctctgaggcctgtcctgtcctatgcagtcccaggcagtactgctccctgtgcctgagacactggcttctccacatagacctcagacacagaactggggccactgccctcactgtgcactttaaagggtcctcctccaggcctccactcagagcctactgtcccgctcttcctaaaccacattccaggtgcccagggtgttggaattatctgcctcagggcccctgttgtcctcctatctgtcctcctacgagtggaccacaccaccagtatacacagctcaatgtccaagaggcagccacgacatcactgtttgggtctggtggctaagaagaaacttggacatgtaggctgggagtccacatccatgaactcaaggcccccaggaggcacacgatgaattcgagtgggaagagaagggggtaggccacgggacagaggcctccctctggagtcttcctctaaccgctgcaaatgttagaggcagttctacccccaaagcttctaggggaaaggagtgaaggatttggcaataaagtccttagtttttgcaaatgtctgcaagtcataaaagtgcttttaagttctccacaggtcaggactggtcatgttaggttcttacacctctcccatagtccctccacccctagacattgggagactcccagtcaattcaccacccaggatggctgcccctcaccttcttcccagggccccacatccaattaatccaaatacacccatgtattcaagcacctttctgatgaacctctagaaagtagccagtgctgcagaaatttcttgtagcatgtgctgaaatttctaggatcctaccagtcaaagaacaacagtctccttgcttccaccagggaatttgctaacacttgcttctaagatctgacctctcagagccactgtggtccatcaatcaattcaaaaattatagtggcctggggttgtgtgggtgaggtggctgcttgggaggctgaggtgggaggatggcttaagcccagtagtgcaaggctgttgcaagctgtgaccgcaccactgcactcctgcctgtgcaacagagcaagacaccatctttataaaaacaaaccagcagccagacgcggtggctgacacctgtaatcccaacactttgggaggccgaggtgggcggatcacgaggtgaggagtttgagaccagcctggccaatatggtgaaaccctgtctctcccaaaaacacaaaaactatctgggtgtggtggtgtgtgcctgtagtcccagccactcgggaggctgaggcagaagaatcgcttgaacccaggaggcggaggctgcagtgagccgagatcgcgccactgcactccagcctgggtgacagagtgagactctgtctcaaaacaaaacaaaacaaaacaaaacaaaacaccagcaaacaaacattgtgaactacaattaaatttatttaatcacagtactaaatgctacacagcaactgtgtagaatactgcatagcaatgaaaagccatgctttaaaagagttgtgccttacatgaggaagtgtgcataatataattttaattgaaaatcagattggcaggataatcattttttataaaacaacaacaacaaaaaaacaatgtccgggcgcggtggctcacacctgtaatcccagcactttgggaggccgaggcgggcagatcaggaggtcaggagctcgagaccatcctggctaacacggtgaaaccccgtctctactaaaaatacaaaaaattagccgggcgtggtggcgggcgcctgtagtcccagctactcgggaggctgaggcaggagaatggcgtgaacccgggaggcggagcttgcagtgagccgagattgtgccactgcactccaacctgggtgacagagcgagactccgtctcaaaaataaagtatatatatatatactgtacaaatacacaggaaaaaaaataacagaaatcttcaggccttactgttaacagtggttattgctgggtggtggataacaggtgatttttttatttccttctgtgttgtttttatattttccaaaaaatttacagtgtatcaagttgactggatcaaggggtatgtgtttgcgtgtgagtgtgtctattctgagtgtgtctatgagggtgtttctggataaggttagcatttgaatcagtaacctgagtgatgaaaattgttctcacccatgtgggtgggcaccacccgatcttctgaggtctgaatagaacaaaaaggcagaggaaggaggagttcaccccttgttgcctcctgcctgcctgcttcagctgatgcatccgtctcctcatgcccttggactgggatttacactgccactaccctggttctcaggcctttggacttaggatggaaacacaaccccagctttcctgagtctccagcttgaagacagcagcaggtcatggtacttcagagcctccataattgcatgagtgagttcttcctgtatacatgtccttctggttctgtttctccgagaggtctggctgatacatacctgaccaaatattgcttttacaatgagaaaaagattggtaactattatttttaatcagtaaatggtatgcaccaaacctggccggtctgccttcaggggggcctctctgtagcattttctcagacataagtacaacttttgagagtgtaacatgccaggctctgtgcccaacatttggcacatatagccttacctgatcttcacaacgctgtccattttaggaagctcacattcagaaacgtttattctctcacttacccagggtacacagtatgctccccaaaagtatattatggaaacacatggccattgatttgtgatgatatttaagagtttggtatagaggtcctgagcccggagtgctatgggcacaactcatgacctatgtgaatggtgcctcctggacttgtgcagggcaccagcttcaagggactctgctgactcccagcagtacctgggggaattgtcagcaatcctaaaagcaagctcagcctgcaaggctgcctaccccggacagatgatgccccctccaattgagccatgatcccatagagccgtagaaaatgggtcacctcctgcaggaagccaccagggtgcttgcatggctgggaactcttttttctctaactgtcccagaccatctgctgctttcctccctgcttccaaaaaaaaaaaaaaaaaaaaaaaaaaaaaaaaagtcattctctaaatttttatggtgggcaaagttatcagttttcagtaagcccattccttagctcccctatttgatccatcctcttctggaaaccttccaggaccccatcttcattgccttccttgctggttacaccatctggatcagttttctagggctgccataaccaagtaccacagattgggtggtacaacagaattctatttcttcacagttctggaggctggaagtccaacatcaaagtgtcagcaggtgtactttcttctgaggcctctctcctgagcatgtagatggctctcgcctctttatatcttctcatggtcttccctctgggtgtgtctgtgccctaagcccctcttcttacaaggacaccagtcatattggattagggcccaccccaataacttcacttagtgtaactacctttttaaaaaccctatctccaaatatagtcataaggtgttagggcttcaatatacacatggtggggggtgggaagatgcaatgcagcctatgacatcatctttctagaagtgtcataagagtatgtctgtcactctcaacacagttcaaaggcactctcaggactgtgagggccttgtggggaccccacattcacacactccccatgcttctcacaatgaagatgccaccgtcggagtcgccgtattcctctgcacagactgggtcaggacccaccgctcaccttaggatcaccaagggtgcctacctcatagcgcccatggcagagcaaatcgccgtgtttccattctggatatagctcctaaaatccagccaccacacccccaagtctggcacaaagtgaagagtttcatgatcaaccaacgtggtttagtttggctcagacctaggaagatctaaaactttacgccggatcatgttcctcccacacacaaatacactgcaaacacacctggcttggagttatgctgattagaagttaattaacataaagcagggagtgttggctgtaattcagtggctgctgcagcaaggctggcaaggtccccttcctgcatgttgcccaattccaaatgctgagcgtgcccaccaccctgcgtaccgcggctacccacacatgcaatgtgtccactcaggtttcttcatggccaaggctcaccttcctgaggcccccaagtctaaggtcaggggaagcaccacagagaggatcagaggatctcaaaggcccaagtccttccaaatgggtgaccactagccctgcccactgtccagactcacagactgcagaatccaatgagaagcctgtaattttgattttcttcttttccctgaatgactctgaatctccttttaccccaacccctggaggaggccttttctcaccagccaatctgaaaacccctttctctacaccgcctttcagtggaggaatgacaggtgctggggttgctatttctgccacacagatagtagggcatttattgtggaccagacttgtcccaaaggagggtttccagtctccaattggggtcatccaagcatggctgtttcctgaagaaatagctctggacctttgatgaacagaaaaaagaatgaaggaatgattccatgtgcaatcaagctcagattccccacataaagtctgtcaaaggccattcttagcttgagaattttaagagtaagatttttctctgccccccaaggaaaaggtccattgtggttctgctacacatttgatttcttttttttttttttttttttgaggctgggtctcactctgtcactccagccggagtgcagtggttcgatcatagctcactgcagccttgacctctctggctcaagcgatcttaccacatcagccttcctagtagctgggaccacaagcatgtgtctccatgccaggctattttttaaaaattttttgtagagatggggtctcaccatgtttcccaggtctcgaactcctgggctcaagtagttctcccaccttggcctcccaaaatgctgggattacaggtataagccaccacacccagcccacatttgattttgaccagccacattcgagttgccacattcccccaggctgccaggacatggagatgaatccaacaaacaaaccaggatgggctgtttggttctgtcccaccaattgtggaaaatgcgagcaaaaaaaccaccatcttgctcctgacataatcaccccgaagagtaagtaattggacaaaaaaaacattgttaaattaggcttctcccagttcccaaaagtaaaaccacaatataaaatggcagagtatttgtgtcctccaaggtgaggggcaaccttcattataaaaccacaccgaccagacaatattattcagtaataaaaaggtataaaggaccgttacatgctacaacatggatgaaccctgaaaacattatgctgagtgaaagaaaccagtcacaaaagaccacataggatgtggtttcatttatgtaaaatgtccagaaagggcaaatctgtagaagcaaactgtggattagtggttgccgggggttggagggaggtggaggatgggaactgcctactagtgggtacagggtttctgtctggtgtgataaaatgtgctggaattaaatggtagcaaatcaatgaataactttctgactattccaaatatccctgagtgtacaccttgaaatggcgaatctcatgttacgggaattaccccaatggtgctatttttttcagttttatttttgtttctatttgtttatttatttattttgagacagagtttcactctgttgcccaggctggagtgccgtggcacgatctcggctcactgcaacctctgcctcccgggttcaagcgattctcctgtctaagcctcctgagtagttgggagtacaggcttgtgccactacgcccagctaatttttgtattttagtagagacagggtttcaccatgttggccaggctggtctcaaactcctgatctctggtggtccacccgcctcggcctcccaaagtgttgggattacaggtgtgagcctctgcacctggccgatgatgctcttttttttttttaaagcacagaattgcctacctaagcacagaggtgatgagagggtagggggaggtttaggtagttgattaaggtttaatctgttgtaagaacatttctgcccacttgtttttctcacgagtgttccagaaaacagtctatagagaagcactaatagctttaggtctagcacatttctagacacttggtcctaagccttttctggttacaaaatcaaaggctaaatcaatgaaagctgaaaaatgaaatacaacattctcgacctttaagaaggtaagaaaagtgaaaaggaacacagtaatgtttaattatggagcagctgagtttaaaacctgcttgcccctgctgtgatatgtaatttacaaggcctgctggtatcaagagctgatgggattgttaccaggcgaataggccctttgcccatacgcggcagaaatgtggtcccctttattctacctaaagtactaaagtttcctcaagaaaaacctctggacctttggtgaactaataaatgctcagggtctgggaagtggcttcatgcacccgtttttgtgacaagtttagtgactgccttttctactaggttataaattacttctcatatagactatttcttttttttattttttgttattttactttaagttctgggatacatgtgcagaatgtgcaggtttgttacataggtatacatgccccatggtggtttgccgcacccatcaacccgtcatctaggtcttaagccccacataccttatgtatttgtcctaatgctctccctccccttgcctcccacccccaaacaggcccctgtgtgtgatgttcccctccctgtgtccgtgggttctcattgttcaactcccacttgtgagtgagaacatgcggtgtttggttttctgttcccgtgttagtttggtgaggatgatgccttccagcttcattcgtgtccctgcaaaggacatgatctcattcttcatggctgcatagtattccatggtgtatatgtgccacattttctttgtccagtctacttctcatacagactatttctacgcctttcattcacctggtggaaactctatcctttttcctgaagttggcatttctcctgacatctcaatctgcccagttgctccttctctacctcacaggaaagttatgctgatgagtaaggacacacccttctcacacactgagctgttttggcaagactaggtggtgtgaatatcaggccttgtgacggggcgggggaccttgctggagcctcagcttcttcactgcccacattgcgtctctgtcttactcacttgacctgttggctctgttcagaggtcttgcttgatcctttaagacccagatgtcccttctgagtcatcgtgtggcatttggccttgtcttccccggcctgcatttacacccaatcctccttccctgtgtgtcatcacacacctgcgtagcacttgcagttggagtcgggagagcagagaagatggaagagaggcattggttcatgtccagttggaaaatcagtaatgtttccatgtggcagctgaagtggaggggagagaacactcagtcaacccttcaaatcaaggacctccatggtggaggtgggtgtggtctacaaagaagcatgcccctgtgctgaagggatcactcccctcctgccccgcagtaattaccattatccagggatggaaaggagaacgtgtggttgaggaaatgttagctcttttcctccttttcctggaccacaaagctaagctggatagaaaagcttgcagggcagaaacagttgtaaaagacatccatggggacaccctagatgtcagctgttcccattctgttccttcctccccaccccactctctttggcaagccagtcctccactggggcacctgtaatgagttactccctgctgcacggcctcacttctctccaagaactagcctcatcattcggactcatcatgaatccataccttagagcctcttgagccacctctagggtgcttaacaatcctctgtttatgttgttccctccacctagaacatctttcctgctccctatctccaagtggcaaactcttaatgtatacatcaagacccagcaggggccaggcatggtggctcatgtctgtaatcccagcactttgggaggccgaggctggtggatcacctgaggtcaggagttcgagaccagcctggccaacatggtgaaaccctgtctctactaaaaatagaaaaattagccaggtgtggtggcacatgcctgtaatcccagctacttgggaggttgagacaggagaatggctggaaccagggagacggaggtagcagtgagccaagatcgtgccactgcactccagcctaggcgacagagagagattccatctcaaaaaaaaaagaaaaaaagacccaactgaaatctgaaatgtcagtctgatgaagcctatgaatcctgctcagtataatgttttaaatgcataaaataagatacatgggttataaaataaactgattaaactaaaatatagttatcaaaatatgttaatactcattaaacttaaatatctaaaaactcactgaataagatctagtggtgagcctaataacaaacataatttaacagtgatatgtgtaaaggacattttgagatttgttacacctggaattaggttgaccaacttgtcctggcttgtaccatactttcccagtttagcactgaaaatcctgtgtcctggaaattccctctgtccctggcaaactggcacttgagaaccctgtgtcctggagaacccctcagtccctggcgaactggggcagttggtcaccctacctgtaatgtggcatgaaagcatctgtgattgttagtggtgttataatcacaggtacagctaatgctactgtgagttgctacctgcattcttcatggaggaaaagctctatttcaggtagaggtgagtgaaaataaagatgtgttggtttttcccatccaagttcatgtattttccaatttctctccgtggacagcccccttccagttaagaacccctgcaattggtaggacagagttaggtctactctcccctaatattcatactttgttcttagctctacaataatttaccaaacgctgtaattgtttgtttaaacaacacaacaaaaattctccattaagcacctttcttacagggttgtgggagaattaaaagaaatgtatacaggagagctggcatgaagcaggtcattgtgatacaaccagagccctcttgcatggttgaatctaaattggttgaaaaattttggaaaactggcaggttctactaaagctgaacatgcccctatcctatcacccagcattttgactactgagtatttccccaacaaaaatgagagcttatagtcatcaagagacatgcctaagaattttcctagcaactgtattccaatagccccaaacaaaggataaccccagtgtccatgagagaagaacagatcaagaagttgtgatctatttaaacaaccatataccatacaggaatgagaattcacaaataatatctcagccaggtttggtggcacacacttgtaatctagcactttgggaggctgaggctggaggatcccttgaggctagaagttcaagactagcctaggcagcatgacaagatctcgcttctaccaaatgaaaaaaaaattagccaccatggtggtgtgtgcctgtagtcatagctatttgggaggccgaggcaggaggatcacttgagcccaggaatttgaggctgcagtgagccatgatggcaccactgcactccagtctgggtaagagaacgagaccctgtctctaaaaattaaaaagcaatttaaaaaacaataataacatatctagggaacaatattaataaatctcacaagcataattttgaacaaaattacagttacaaaacaatgcatattgcatgattccatttgtataaaagaagggtgaaacaccagcctggaagctagaagtcaaggtagtggttactgctgaagggggtgggaatattctgctggttacctaagggtattgagttcgtgaaatctactgaatggtgtacttatggcacgtgcatttttctatattatgttatacttcaacaaaagcattcaatatgttgggtcctcattcccacctcttgccagatcccacctgcagccaccaccaccaagaagtgacctctccctgcattttccacttgggttggctctgcgacttggcaaagacttttccctgctgaatccatccctctctccacagtgctttgaacttcctcctggacaagggcaaccacagcctctggcactaacctcttaagttgccttcacaaccatcaatgcttcattagtatttctggcaggctggtaattaacatgttagcacatacctgtgtattcaaagcagcttttgggcccgagcttactatcctttacactatttcagggaaggatttgtattgaattctgtggtttcaactgtgccaagcagcaattgataatctttcatccgcagcagctgtaacaatgatgggagcagcaggcatgatacccctgcacagatgagaaaactcatcctcagtgtgaacttatgtcaccccaaagatgcccagcaaatataccatttattgtctgaggtggaaatcaccctccatgagagagaaggccaaagctcccctgtaatcgatgatgactaagccctgcaaagccgagaatggcaggctggggattagaactcatgtctttggctcatgtccactctctgtgcagcgccctgccctcacccccctcccccgagaacgaacaccacccctgggcaacccaggtgtccccactctgacacagtaaaagctggaccgtcatctggtccaggtagcctcgtcctgggggaggcctttctccatttggacattttcctgtgtatttagggagagtgacaaactgcagaccaacttatcaggttaattatgcttttaaaaacatcgcagacgaggagcaaagtgatggggaggctaaatgaggaactcggtggtggctgagtctggcattctttgcccttctttgggtctgcaggtgggagtttctgccctttcctgggcctctcctttctggacaacccgagagacagatcaccttaaaacacagccttcatcctgtacctgccctaagccttcagtggctccccatcttctaccttctcacctacaaacatcctgtcccacatacactgggtgattcccgcacgagaggaagaactgcttcagtggtcccggctgagccagaaggaccactgctcttcctcatctcccacccttcctcacctccctcccatcctccccatactccaccccaatccctgccctgagtcaattgctcacagccaagttccaaacactaactgcactctgaccgggaagggcagagaactgcaggggaaatgatccatggattagcacagcatttgcttctccaagctgtggccaccctctgggctcattttctgcttctaaacaactctataccacagaatctcaactaccaccatgacgggtcttcaacatgctgcccttgatttaaaagacaaccgcaacaactgtaaaactgtctcccttatccctgtaaaatttgctcttgctgcttttgtgtattccaaccaactgcgatgtggaccgtcaccgatcaacaagggataaagggaatctagatgcatctagattccaggcactgtgctaggtgccaggcaaacacatgtgaatgaaacacagtccttcaacttctatgagctcagcagaatgtgtgaatgggaggctccggtgactacagtaataggctctgtgccaagtggcaaaggaaccacatggagactcgcggctgggtttgggagcagaagagtgggcaaaccgtaaaggagggtgaatttaagattttaaaaaagccatagtccaaattctaaaatagtaaaagctgaaaaataggcatattctatgacccagcaaatctactcctgagtatatattcaacagaaatatgggcaccaagaagaacatgcaggaatattcatgacaacactattcataagatcccaaatgagaaaccgcccaaatgtccatcaacagggaaatggataagtaggttgtggaatattcttacaatggaatgaatgatctataactacacacaatgtgggtgaacctcaaatacgtaattcgagcaaaacacagacacagaagattatattctatataattctatgtatatgaaatacaaaaccaggcaaaactaatctatggcatgggactcagaaaagtggtcagcataggggagggaattgtggcgtgaagaggccatgaggagcttggagtgtgctgtcatgctcagtttcctaatctaggtgcaggttacaatggtgtatttggtttgtaaaaatacataatgctgggccgggtgtggtggctcatgcctgtaatcccagcactttgggaggccgaggcgggtggatcacgagatcaggagatccagaccatcctggctaacacggtgaaaccccatctctactaaaaatacaaaaaattggccgagtgtggtagcccatgcctgtggtctcagctactcgggaggctgaggcaggagaatcgcttgaacctggaagccgggggttgcagtgagccgagatggcgccaccgcactccagcctgggtgacagagtgagactccatctaaaaaaaaaaaaaaaccataatgctggacattgcaaatatgtgcacctttgtgtggatctcagacttgaataaaaagaaaaaattaagtatgtctattgtcttagtccattcaggttgctataataaaatatcataaactgggtggcttataaacaccacacatttatttctcactgttctggaggctggcaagtccaagatcaaggtgccagcagattgggtgtctggtgagaacccactttgtggttcatagatggccatctttcactgtgtgcccacatggcagaagggacaagggagtactctcaggcctctattataagggcactaatcccaatcataagggcttcacccatatgacctaatcacctcccaaagatccacctccattaccattacctcgggggtgagaatttcaacatatgagttgttgagggacacaagcattcagactgtaacagctgtttaggtagctacacagctaaataagtattattttccaaatcacatttcagcgatttctctaccattaggccatgggccagcaatggaacctggcttatccttcttgtgttcttcttttcctggcacaaatatggttggtaatcttgccaaacagtaatctccctggtatagttaatttggcctgctaggttatatccaaacgatcactgtattcacctataaatgctctcaaactggtccaaggtctaatcaaagctggaaattgatcaaataatgacccattcatgcattctagaattcagccattccctgttgcgtttttagaaactggcataattttctattatttacgcgatctagagaactatgtcatagacccctgcatcatagaacacccagatctgtggtctccatctcattcttcctgctttctcaaagatgatctacacacagttctatttcccagactatataatataatccactttatgtaacatagtgtaattcacttggccctggtctctcagttcttttgaagaaatgaatgttctcacactaattccttggtctgtttgtcgatctttacaggcagggagggaggatgcgaggcagcattgggtcggctccacattctccacatctgcttattgttttcttgccttgtttgcagcttccagagctcctccctgcttctgtagcaatttcagtcttccccattcctctgtgcctttgtaaacagccttttgttcactaacaagaggaatctgctgccacgtcagctctaaaccaacctcccaccattctctgggtaaagtcctgcttagaaagggaataggaagaagaggggtggagggggttggagatgattgtgtctagtgggaacaggcagggggatagtgcacagagttcacaatgggacaacgagcctgccgaggctgcactgccggcctggctgggtgaccttgagcctatctgggcctgtgagctcaccatgcaaaggagctggaccacagaattctgagtcctttctagctctaaacactgtggccctaagtatctatatgtgaaacaaaattgtcctgacatttgtctctgggtactgaactattaggagattttgattttttcatctccattttgcaaacagtctgtactaagattacactactgtgtttctgttttgtgtgtattcagaagcacaaaaagtctgtggttctagaaaggaaatagaaaagttcttaaaaaaaaaaaagtggggaagtgaaacaaatgttaaagtcagaggagaaagaaaggcccaaccggaggccccaaatccacccagagcccagaagcccgggtttcccaccgaccggctgcggtctttgtcagctctctggcgctatctgctgtccttctcgataacaaccgtttaatttggtttgcaaaattgctctgacgcaaatccaccgtgaacactgacggggtcacattcagcataaaaatcgcattctgtttacaggaaaatctggccccatacttgctcccatattcacttttgactttgccttgcagtactaactgtaacagggacacctgagcaagtcccttctgtataaggcccaaaatggtcacccaataccaatgagtctcttgctttggaaagcccaggaatgcacctccagccccttctgcgcagcgctcggacaccatgtagaggagaaggcactctgcagaactcgccctcagcccgcaccacctgtccaggggactggctgcgtgtcaatgtgtctctgctcccggggttcccgcagatctttaacttattggcctttgggctaattcagtccttcaagcattcctcgcccaacatgccaggaagtcttctcacgtgtcttccaccccatacctaccagttctgttttcccactacccgatgaaagtgtaaccgccccccggcgccccccccccccaccaccacacacacaccctgttggtcccatcctcagggcgtggtggtccaggtgaacgcttgccctctttttgagctgaacctccccacagaggctgtcagcaaagactgctttgctgtccaaggccggcctttaggtacaggacactatgcatgtccagcgaggcttgttgaagccacatctgtcatagatattgatgggaaaagcattttccttctaacacatctcattccaattctaaaaggcacctctgaagccttgctgaacttcatcaagattttcacgtggtttccttagtaaagtgtgatgagaaggtccatccttctcaggatgaaggagtggtccaggaagccctgattggtctgccggggagggaagggctgccttatttggagacctgcaggaatgccacctcccccggcagctcctatatagctgggcggacctggctgccaagagggtgtgctgggggactgtgcagctcgaggctccagaggcacactccagagagagccaaggtacgtggggggccacttctgtggtcaggactgctggtttcttatcaaggctcgatcccagattgaaaatcatgcaatgatttctttactcccacacctggggatgggtcccaagttcagggtagacttgcgaggatacccagtcatcactgggcttgcctttctctaagttggtgctataataaaatgctactttagggtttgtgggttgggattttgttttgcctttaagcttctgcctatgaaaactaatctctttctcaagaatgctgtgcttttattttttttatttgactcacctgaaatgatctattatgccattaatcttatttaagatttctccttaaaaaaggaatgatgtggagtatggccctatttaggagactaatgaatatttgcttcatgcttggatctctttggagaaagtcagtctgagttcactgtgctcaggaggcagagagagtggggtgagggggtccagatgctcatagccaccctgggacaaagacgaggcgatgtctacaagcaaggaaaggtcagtgaggcctctttgcaggcttctagagatgactggatgtgcttctagagatcacttcagctgtgttttgccttttttttttaatataaggagcaatgtggcatcagagttgaacattttatcagaggaacattagccacttttagggaagctgcagcagggtggtggagggtgtgtgaggggcgaaacaagctccctgtcagcctcctccagctctggggccccatggcctcacagtaagtctttgcctaggagacagcttaggcaagctccggtatgggaactccttccatttccctaatccacacaggcaaagacccaggtgctagaatgccctgacagtcggccttgggaagtggatttccttgatggctattgtagattcaggagccgaatgtgacaggcaaccttaaggtgtggggtgaggggcttttccatgacatcagtggcagcccttcggatgtcccagggccaccttgacccgggaccctcctggtgttcccccaggccctcctgtcttccctttcatctcgttttctccgaaattcctcaagggccctgccctttgccctttgcccagctcagggggcatcatacccagtgagtgaaaagcacagtgtgtgagcactgtcttctcctgaaacccagatgggcagtggggcatggctagtggacacatgcagtgcagcattagacagagcccagtgcaggtctgccacctccccgctgtgcagccttgggcaaattacttaacttctctgaatcccaggacaacatttataacatggggataataatgtacctactctatgtgagaattaagttaggcaatgtcagagaagagcttaacacggtggcaggcatgaagaaagtatgcaataaaaagccagtaggataagcagatggtcacactgtcccccaggggtgagattggaaaggatgcctggagcacacttgacccctggacataggggaggcaggggtccctttgctacgtttccatctttcccttccttcctcctcctctctctctcattactgcaaagccctttaggatcagcagccagtgaattcctcagaatggatggcagaatgcccccaagacagtgccagctcagagcaataaagaacaaagaggggagattgaaagtacaatctaaagtcggcacagtggctcgtgcctgtaatctcagcactttgggaggctgaggtgggaggatcacttgagcctgggcaacatagtgagaccccgtttctacaacatgtatttaaaaattagctgggtgtggtagtgtgtgcctgtagtcccagctactccggaggctgaggcaagaggattgcttgagcccaggagttcagggctgcaatgagctatgatcatgccactgcactccagcctgggcaacagagtgagatcctgtctctaaaatatgtgtgtgtgtgtgtgtgtgtgtgtgtgtgtgtgtgtatgtgtgtgtgtctgtacatatacgtatatatatatgtgtgtatatatacatatatgtgtgtatatatgtatatatgtgtgtgtatatacgtgtatatatacatatatatgtgtatatatatacgtgtatacacacacacacacacacacacatatagtccatgcccaccagcatttgattccaactcttctattgtattttcctcccagggatttcttgatttgaaagacttgggagtatcaaagaaaacctacatgtattaagtcaccactcctttattttcccatgcgtattcaaagccactataattgccctttgccattcttacctgtctcggaaaccgggaccagagccctgagtgaatgtaatcctagcaatagcaaaggagctcggtgtttgagttaaccctgcacaacccaaacatggggaaacaattatgcttttgagaccacataaatagcacaaggatgcgattccttccttaaaatctcctgcacttgggagggggcaggggagcccaggcaggcctggtggggagctgacccaccgccgtttctctggcaggttctgacgcgatgaggaagcacctgagctggtggtggctggccactgtctgcatgctgctcttcagccacctctctgcggtccagacgaggggcatcaagcacagaatcaagtggaaccggaaggccctgcccagcactgcccagatcactgaggcccaggtggctgagaaccgcccgggagccttcatcaagcaaggccgcaagctcgacattgacttcggagccgagggcaacaggtactacgaggccaactactggcagttccccgatggcatccactacaacggctgctctgaggctaatgtgaccaaggaggcatttgtcaccggctgcatcaatgccacccaggcggcgaaccagggggagttccagaagccagacaacaagctccaccagcaggtgctctggcggctggtccaggagctctgctccctcaagcattgcgagttttggttggagaggggcgcaggacttcgggtcaccatgcaccagccagtgctcctctgccttctggctttgatctggctcacggtgaaataagcttgccaggaggctggcagtacagagtgcagcagcgagcaaatcctggcaagtgacccagctcttctcccccaaacccacgcgtgttctgaaggtgcccaggagcggcgatgcactcgcactgcaaatgccgctctcacgtatgcgccctggtatgtgcctgcgttctgatagatgggggactgtggcttctccgtcactccattctcagcccctagcagagcgtctggcacactagattagtagtaaatgcttgatgagaagaacacatcaggcactgcgccacctgcttcacagtacttcccaacaactcttagaggtaggtgtattcccgttttacagataaggaaactgaggcccagagagctgaagtactgcacccagcatcaccagctagaaagtggcagagccaggattcaaccctggcttgtctaaccccaggttttctgctctgtccaattccagagctgtctggtgatcactttatgtctcacagggacccacatccaaacatgtatctctaatgaaattgtgaaagctccatgtttagaaataaatgaaaacacctgagctggtggctgtgtactttgactggtacatggaggctattttaatccttctaactaaactaaaatagattaaaggaattaaactaaaatacaagtaaagctagacaaaggcccagaaatcatactgtaaggaaatgttattggaagctgattcccagagcagaccacatatacagcaggatgtgcctgtggcatgaagattttctttctcttttttttttttttttagatggagttttactcttgttgcccaggctggagtgcaacggcatgattttggctcactgcagcctctgcctcccaggctcaagcacttttcctgtctcagccttccgagtagctgggattacaggtgtgtgccatcatgcctgactaattttgtatttttagtagagacagggtttcaccatgttggccaggctggtcttgaactcctgacctcaggtgatccacccacctgggcctcccatagtgctgggattcaattttttttttttttttttcaaaagaagggtaagtgcttgctgttcccatccctgaaacattgcatgtatttaagaaaaacaaaatgttagtggcatatttgcttctaatgttcccctaaccctacatgcatgttttatgtgcactcatatgagtatctttaaatataatccctttacatctgtgttctatgcaaagtctctcatttctttcaagacagcctaatgaaggccatcatctctgtaaaccacttgtcactacaaaaatacaattactcaccaaaaagctttaaaaaataaagctgtgtctttagggagacccaataaagaatgcaatccatgccataagcaggagttgatacaccaccttattagctaaaaatatatataacacaatatgagtaatgtttaagatctgttttaaatttaaaacaatgaattgaatgctctaagaggctcctacaggcgctccaggccactctcagagactcccaggagttgttgaactatatttggagaaaacagccactgaatattatcatttctcctttaaagagagtttgtaaggggggaacatgcattttatcagacaatttatccaaagcattgcagaacatgagtgctgatgagggcacctcttgtgctgagtcccctcagctatcagtgttcttctcaaggacacatttggaaggttttaacattgaaagtgagcggaggacttgggggcagagcagcacaaagaaacagccttacactgggcacatggaggagacgtccaccctgcagccaggactggggttcacgtcactgccagagctacactcgccttctgcttccacggtcctgttaattctagatcagagagcaagaaaaaagtacagaacatatcctctacggttatttcctgctttctaattaaaaaaataataaccatggcaagagagaaagaaagagaaagtactcagaggctgacactgacatttcacttcctcgctctcctaagtttaattacaacagcacgtgcagccacgtcagccaaatgacttcatttctgatgtgaaaacgcttaggccatgatgtcgttcattttctgtaattgctgccttttctcattctgttaatagtcccggcaaccagatttcagtggggcatgacgtgaatgtgtatatggtgattcaaatgcaaaatttgtttatggggcttttaatcgaacgcgtgtgtgcctgaacattcttgctcaagttgatgaatcatggggtggaataaaggctgagtttagtttttcactttagcaaaggggcaatggggtgcctactatgtgcgagacattgggaggggcttctgaattattctggatatcgtcattttgcagtgtgcataattttgccaaccgttgctttcgtagcccctgctaagtgttgactttttaaaatataagtttattgtaaaagtgacatgaaaattacaacagatattccagaccaaaataatacaacaatcccagcatctgattgagtcagtgtttgctgtttcccctgcactttcctagttcttaagcatttgcgtatgtaaacattcatatttgcaataaaaaagtgagcttttatattctaaatttttacttaacttaattcaatgctttctactcatttttctatacttttttttttgaggcagagtctcattctgttgcccaggctggagtgcagtggcgtgatcttggctcactacaacctccaccttccaggcttaagcgattctcatgcctcatcctcccaagtaggtgggattacaggtgcccaccaccaagccctgcaaatttttttgtatttttagtagagacagtgttttgccatgttggccaggctggtctcgaactcctgacatcaggtgatccacctgcctcggcctcccaaagtgctgggattacaggtgtgagccaccacgccctgcctactctttgttttctttcctccccacccattttcccccgtcctgtcccctccttccagcctgagatgtaggctccaccttaactgtgctcagatacacaagtgagggctttttaacttgattatgccttttaaaaatactatgtatgtaaaatatttattcatctgcaatttggcttccctaacttaacattgcatcatgaaactctttggaacaacagctatctagatagctgactcattcttttggattgctacgtaatctcacttaatacagatgtatcatgattgattgaatcattgccttgttgatgggccttcagattatttccagttttttgccactgcaaacaataaacatccttgtacatactacattgcagtctggtacttctgtttctgtggaatagattcacacgtgcaaaatttctggaacaaagcctgtgtgtaatttaaattttaccagccatgaccgggctatgctcgcacatagctggagcaaatcctattcccaccagctgtttacggcattaatttggaagagtttctgtcatttaactatgagaagccaccttttctacaaatgttgcctacacatcttctctcttttgcaaacggcacacctaaagctctctaaaactttcggccatgaggaccatttgaaaatcctcctaaaactgttagcaattctcattctaaacctggtccttggcccaaaacatctgcatgagaagcctggaaaacaggcagtgagtgtgtaggcttccaactcagagggtggtgtgtctgcacagctccacacaccccagcaactgggaaggcttgaggtgaggttatgccctggcctttttactgacttttactaaaattacacatgcaagtatttgcattccagccagaataccctctagatccaaaagctcaaaaggagcagagaattgagaacactattaaagtagcccatgctgttcctcccctccaggctctggcagacaaccagcatttccctggtgcccctcacaccctaccttgcttaggatatgcctgacaatgtctagaaacttcaccctctggtcctaatagggtgtcccaggcagtgaccttaagtttgtcttgagccgcccacacgctctacctcaagttttctgacaacaagtgactggattggggtggtggctgattgggtcaaggaccccaggccctacatcgtacctatggtgtggtcacatctttttcctgcacccaagacttttttgtcatggctgtagatggatggacacgtgcaccctaagctgtctctgtgttgctgcatgacacatcctgagtctaccagagtctctactgaaatgtgacagcagggcccatgtgccttcatgtaaccagcactgtcacagaccacacctgccaggcgagtgatcaagacttacacagacatggcatcatgaccagtttcagtttttctggctcagacaccactctgttgaggaacagacttcttggtgagcctggctcaggccagaggctaagagtttgctgtctccccagaggccacgagtcagagaagagcgagggcttcctcttcccttatcctcagtgctggcagaagaccccatttcagtgggcacccagcttccccagtggaagaaaaaggagcccaaccctcatgcctctgggaatgcatccctacaaaatgggaataactcagatattccctgcaaaatgagactaaaatactatgactttgagaaatctcaaagcacattccagatcatccaaagactgccccggaaaaacagactcagctttggcaaatgggagccttcccctgggcccgtggctttagggagcctcactttggagcaggagcatgcacggggaagcgaccgagattccacccccagagcactaaagccccgaggcctccctcccacagtgagccccagaccccaaacagagggtggagaatgtgctcctctggcattggatgagaggccttagactgaaatgagccccatgcactgaccatgccccttctaaagggatcttcctggtcagcacaaagctgaccccccaaaagagctcatcctccaatactcaagtgtcatccctgttccctggactgaactgtaatgggcacacaaattccctggaatcttggtgaaatgtaccttctgcttcagcaggtttggggtggaccagattgtacgttccttttcttttcttttttctttttttttttttttgagtcagagtttcagtcttgttgcccaggctggagtgcaatggtgtcatctcggctcaccacaacctctgcctcccagattcaagcgattctactgccccagcctcctgagtagctgggattataggcatgcaccaccacgccaggctaattttgtatttttagtagagacaggggtctgtccatgttggtcagcctagtctcgaactccggacctcaggtgacccgcctgcctcggcctcccaaaggctgggatcacaggcgtgagccaccccgctgagtcccagattctacatttctagcaagtgtcactgcctcctccaagatgccctgtaccctaaactgaacttcatccctccatccgcccctcccgccctcccatccgtcctggggattcccagatcttgttttaatgcaaacccttttgtgagaaagcattgctttcttaaacaatgcaaattgttttgactccaacaggtttggctataatctgtcgaaggaaattggcagaaggccagagaggaactagaggaagctggaagcaggcagttcaaggccacatgaactcacacagctgccctcccttgatggtgggaggtgggtggtggggagggagaggggaggtactggttgcggggaggagaccttccatacaccccgtgtccaagggagaattacatgcacaggcttatcagaggtgacaccagcatccagcagggaagggtgttttgcaaccaggggctccatgctcaaaaaaataacattcagcaccaaggagagggattttcaagaacgaagcagagggtaaggtgcaggcagggtcccggctaggtgcaagccatgtcggttgtggtgtgctggaatttcgaaatctgtaattaagattctaatttttttaattggctgttttggttcggggctacttagcaatcaagaacaaaatggaggcgcttatgacgtctcttaaatatcgtttattcctgtcgtgcccaagccaaatcatgtcatcacctctgatttcctggggcaaacaaatagaggaagcaggaagcaaagggctggtgggttttccttagctttgggcccacttgggatagccaaacagtggaagcctccacccaaagttaacgggctttctaggctcatttgcacaagagcagactccaagaagtttcttctggaatttcaaatgtgatgtggtctgcaaatctgctccctgtcagctaagaagatgttgacctgtgcagatggctgtttccagaagtcgagctgtcagactctttccaagggcaggacccaggcctcccccatctgtctgtggagccctcataagcagcatcctgccttagagatgggttttacttagaattacagaacatttttcctctgggcattatctcagctcctaacttatgtttaacatttgagccaatgtccttctttgcctcatcttgggcattttgtggatttgttcatgcttccactcgacaaacatgcattcaattcctgccatgagtctgtctgctccgtgcgggagctgtaatggtgggcaacagaggcaacgtgcctgctgttaggtgttttgttctggtggcacacgcatgcatgtataaccagaggtgtgctagtgtaccagctctatgcccgagtaggggtgagggagccctaatttgtactatttgccaatttctatgatgtaaatggtgacccagccaatttcaagttacccacactcactgaatgtggagttaatagagatgtgtatgttcatctctcagaagcctgtttgacctgctccagcacaattaatttaatttaactgtttactttgtaacctttacacatattaattcactcctataaacaatatcatagctcttccaaatcagagctgaagtcatctcaaccgggaggctattgatggattggcgatggtcctccaggtcgctctcccttccatgcagacacctaggtgaaagccaagccccaggtaggcacaggaagagccgaggccagagcggaagagaaatggcacatggagctgccactggagttgaggattatttagcagtaaatcttttttgattttctattgcatgcctggcagtccactggaatctgcagatgccacaatgaatgagtcactgccactgccttcaaggtgctcacagtctgatgcagaaaggataatggccatgcagtatggggaagtgttgtgttagacatgggaattagcaagaaaggtttgctagagaagggaagtctgaaaggatggatggaggcatccaggtggagaagatgggaaagatgtagaatcactgcaaaaaagaaaacaagactatgctgcattcaaggagctgcaagcggtccagtacagtggggatgtgggcacggatggaggagagcgacaagatgaggccagagaatgaaaggagcaagatctgcaaagatccctctggcttgccgtatgttctcttgggaagcacttcgcaaaccataacgggcacacaaattccctgggatcttggcaaaatgcagcttctgcttcgtcaggtttgggatggaccagattctacatttctaacaagctccctggttatgttgatgctgctggtccatggactatcgtttgtatagtaagggtgtaacgaagaggagggcactgaagggtgttaggaaggtggattccacgatcaggcttgcatttctaaagatgactctaggtgctgggggcaggatgggctgcaggcagccacagctgcaggagcaatggaagagaaaaagaaggttaagagttaagtctaggttaggtgcggtggctcatgcctcttatccaaacactttgggaggctaagacggaaggaccactttacccagcagttcgagaccagcctgggcaacatggcgagaccctgtctctacaagaaataaaaactcagccaggcgtggtgatatgcacctgtagtcccagctacttggaaagctgaaatgggaggatcgcttgagcccaggaggtcaaggctgcagtgagccatgatcctgctgttgcactccagcctgggcaacagagcaagacccttctcaaaaaaaaaagaatgagttaaatctggcatgttgatgagcttgagggatcccatttgggttccgctttttgtcaggcttcttgtcctcaccacctgtctcacttgtttctcctcccaaggtggatgtggagcccccaggattcttcctactccaggacatcttctcaggcctctgtgtgccagcttgtgcagcatgacttggctttacagaattgggcaaagtcatgcttaatgtcactcagtcctgttccagagtgaagtcatttattttaggggaagatctatttcagtagctttatttttttatgtagtaatttttattgtttttccttttcaataaaataaatacttgctatgcagtttctcctgaaattataaattaactgttcagggttagcaaagcatgagttattctattgaatctataaaacattcagctttaaaagaaacagatatatatttttttctcattacacattattatataacctttaaggataataaagctgtgttcagatttaaaatttgagaaatctagctataccaagtttttaaaagtgcattaatcaaggctaaattttaaatattgatatatacatatttcataatctgaatctgtttaacatgaacactagcctttctttctgttattttttttttttccctacaagatggcttgactttgcagaacagtggttctcaactactggtgactttgcctccctgggaatatttggaaatatctgatgtaatttttgttgtcatcggggcggaggagataatggcattcactgagtagaacctaaggatgctgctaaacatcctacaatgcatagaatggaaccccataacaaaggaatatgcagcccaaatgtcaaccatgccaaggttaagaaaccctgttgtaaagtgcaactcaattcccattttatgaatagcctctctgttcaatgtaattctgaaaacacagacttgactaatttgcatatactgcttaaaagaatgtttaacctaaccaatgtcattaccaaaagcaatggttgactttaagtatcaagtgatacttccagaatgattaaaccacaaagtcagcttagaaagatagaaattgggacatattatttatataccatttaattgttcttgaatctgctctaccagtctaatctattaatatggaaagttaattagaactgttttgagttagctaagcacatagtttcctttgaacacttttctgaactatgacaaaaattaaattatatataaagcacctgggaaatagaaaagcactctacaaatgttctcaaaatgtttgttgcaacatgtgaaaagtgaagagctttacctacttgtccaaacttgtcatgaacatgtgtttggacagttaaattagtttttatttgttctctcttttttacaatgatctcttatacatgacttttacaaatatcagtgcatatatatagtatgtgtgatacaagagaaagcaaatgtgtttttcacacatgtaaagtatcaagatggcatatgagtattctaattgggagccaactttttttcaaattattctaagttttgggggttttatggttttttgtttgtttgttttttattttttgagacggagtctcactctgtcgcccaggctggagttgcagtggcatgaccttggctcatagcaacctccgtctctcgggttcaagcaattctcctgcctcagcctcccaagtagctgggattacaggcacccgccaccatgcctggctaattttttgtatttttagagagacagggtttcaccatgttggccaggttggtctcgatctcctgacctcaggtgatccacccacctcggcctcccaaagtgctgggattatagtcatgagccgccatggccagtctttttttttttgacaggatctcattctatcatccaggctggagtgcagtggcatgatcatggttcaatgtagcctcgacctcccaggatcaagcgatcttcccgcgtcagcctcctgactaactgggaccacagacatgcaccaccatgcccagataattttttgtatttttagtaaagacagggtttcaccatgttgcccaggttggtctcgacctcctgggctcaagcgatccgcctgccccagccttccaaattactgggattacaaggcgtgagccactgtgcccagcctattctaaggttaagtagagaaagttttcagtactttattaatcatttatctccacatccacatcctatatatttttcatggtcaataaactgattcaaatgacttaagttatcccaccatttaaagagaaaagtctctataataacttgaaatcatggtgttattttaatttcaccaatgactacttttctcagaagttctagctcttcctttgacacacagaaaatagctttttatctcactgggatctgaattcgaagttatgttcttcctcacaaacaaaatataatcagttttatgttctccccagatgccatcagattggacttcgctgcaagttgatattagataataggtttcttctggaggagcctcttccatgggaattcctaattcagcttttagatgcctctgtgctactcaacttatgtcaatgacatcatttctctcaagcttgtctggattacttaatggatgactacaaccaagtattggtgaaactggctcgaaaggtaatttcagcatctgatctctgctgtcactgtagctcattttggtgttgagtaagaagacactaagagcttgatgcaataatccattcccaatgttttcattctcgtgacaattcttcttggtctcagttccaatattactgtcattttcatcaataagaatacacttctctgtggtgcacaatggttcacacctgtcatcccaacattttgagaggccaaagtgggaggatcgtttgaggccaggagtttgtgaccagcctgggcaacatagcgagatcctgtctctgcaaaaattttaaaaattcattgagtgtggtggtgcatgcctgtaatctcagctaatcaggaaactgaggcagaaggatcacttgagcccaggaggtcaaggctgcagtgaaccatgatcacaccactgcactctggcctgggtcacagggcaagaccctgactctaaaaaataaataaataatgaatttgtaaaaagaatacactggtctatgaggagttgaacttgttgctcttggagatgtccaatgcctgtctgaggcatggtcacaggatgtctgatctgccctaaaagacaggcctggcacaagggtggcatcagtgctgggctcaggtgtgccttgggagctttataaatggctgcccctggagtatatggtcaagacctaaagagtggccatgtgtgttttctaatcaagctttactgaattttagaggggaatcatgtataatgagattggcaaggggaattatgtataatgagatttgcaaaaatcctagaacgtcctgctctggaaagtccacagtctacagtgatagggaaacatcagaggtgcaaaaggaacttggggatttgctatggggactcaaaggcagacacatagctggtcctaggacattagaaatgagacttgggcagagtccaggaaaaagtgagagaatggagcagaaaaaggttccctgataaacctgcactgggctgtgtggcatgggaagaacttgttatctctttctagctctgtaagcccaaggctttctatgagcttttaggccttgatatttgtatcattttatgagtctattaggctcaaaaacgtctttgttaagcatttacaaaacatttgtttgaaaactattctgcgtgaaaacatgttgaattcggcgaaagaaaacagtacgtcatcaagtgttttggcacaaaccttacttttagcttttagggctggatatttgtatctttctgtgagtgcccactgggcccaaaaatgtcttttctgagcttctatgaaacgtgtgtttgaaactgttctacgtgaaaacatgttgaattcggtgaaagaaaacagaacatcatcaaggtttttggcagaaaccaggattttatcttttagggctggatatttgggcaacatagtgggacctcatctctacaaaaaataaaaatacattagctgggtgtggtggcatatgcctgtagtcccagctaatcagaaggctgaggcaggaggattgcttgagcccaggaatttgaggctgcagtgaactatgattgcaccactgcagtccacactgggttacagagcagaagaaaataagtgaagtctaacatcgagattgtaggccgggcgtggtggctcacatctgtaatcccagcactttgggaggccaaggttggtggatcacttgagggcaggagttcgagacaagcctgtccaacatggtgaaaccccataaaaatacaaaaatacaaaaaattagctgggtgtagtggcacacacctgtaatttcagctactccggaggctgaggcaggagaatcacttgaatctgggaggtggaggttgcagtgagccgagatcacaccactgcactccagcctgggcaacagagcaagtctcagtctcaattaaataaataaataaataagtaaataaataaataaataaataataaaaataaaatgaagattgtaaataaacttgatcaggtccaaagaaaatagagtcttccttcatcttcgcttatacttagatagcaggccgtctctatgtgagttactcattgcctgaggctggattcaccaagaactagatgccaagtcaaggattcatgtacaagtggtttattcgggaggtgatccctgcaaatgctgcaagtggggaatggaaaaagggaagggaaggtagcccaaaaaggctgtgttagcatgtttattgcatgggcaaccggagcttcactctgcttgggaggcccctggatgccagagtagaacatattcctcagggttatgctgcctgcagggcgagggagctggggaatttatacaccaagatctgtccatcattggttaaggacagctcccaaaggctatacttccctaatagttccaacctgctgagtgcataggctgagtgggcttccgagcatgctggtcccatctcctaatgatgagaggtggaggcacaggagaaggtaaacaaatggcaaagacacttaaatacatgagaaaatgagtccaacctgaactttgacttttctgggtggcccactcatcccactaactaccataacttcatttcgtctgctttttgcaaagaacagacaattccaaacagccaagcctaacaagtagctcatcttagcttgtggattcagagcactggtggcctctccacctccaattgacaccagaaaacatataaatacctctaaacatgccttgggtatttgtttttctaattgcaaatattataccataacttagtttgaaggctttgtaaagaatatgccagaaacatctaatattagccctaaaaactagggcaatcttttttttaacagaagagtgttcatataaacatcaaaagatgtgatgagagtagtttcaacttctaatcatagaaattatagggctatttcatgaaagaggtgctttatcagctcatcttgagtgaatgttaaagatgaagatatggctagtatctccagagtctactgtctcagagaggtagcccaaagttgtaagactgagtgccttgaggtagggaacaggaagcaacagggtctccaggttcactgaggagtactgacctgcaatgcgattcctacatcagcaaaggtcttccttccatcgttagaggactcctggatttgctatgcctatcctgatggcttcctacatgagaccatccattcacacttggcccttacccaggcctgaaattctccccagttgcactccacccacttatgtctatcacttagctcaaagccagtaaagctcatctctgaactagcaaagattccctttatcccatcaaaatgtccttaacatctatcttgaggtcatgcagcatgatcttactttgctggcattctttccttcttctgtggattcccaagcagagtacagatgtacagattccttgggggataagagctggaatttcagcttcttttttttttttttttttttgagacggagtctcgtctgttgccaggctggagtgcggtggtgcaatctctgctcactgcaacctccgactccctggttcaagctattctcctgcctcagcctcccaggcagctgaattacaggcacacaccaccacgcccagctaatttttgtatttttagtagagacagggtttcaccatgttggccaggacggtctcgatctcctgacctcatgatttacctgccttggcctcccaaagtgctgggattacaggcatgagccaccgcacccggcctcaccttcttttatatcccacacagcacccagcacagagcacaaagctaagcgcatcgatccagcgactgactgactgaataaatgaatacatgctatcttgcttgtagaagcccagattcctccttcttacgactcccacacccacttaggagattctattatgtcttaaaagaagttacatctccattagtgtcaaagcaacattatataagtggctcaacatgatcaggcatgaatttctttgttttcccactcacctgaaagcccaaaaacaatccaggtggtggtaaacacttctgatccttcaaagaaaacggaagaaagcgatccctaccgtctattttgaatctaccgttttttgtttttgagtgtcttttaaatctattcaaaatcctttaagggcatttcaccatgcatgggagaaggtcatggatcctcaacaaattgcaagaggcctttcacaggctagactctgccttgttctccaagctcaccttccataatcctgatgtgctccatattgccagactctttcaagtccttccccgccctgcggagaatccctactcacacctcaggaccagctcagacatggtctccaggagaccttttctaagatcctatgtgaggtaactagcccccttggcaccttgtgacataattattcacttccatgtacatgtcccgtagtgaactatgagcacctccagaccttaccctgcgtttggtcgccttgctctcctctctgcagctggcacccaatctttccaggctgtctctagggactcgagcccttgggatggggtcctcaatgcttttccacctgcctggcttctaaattccactaagatcctgtcccattctcttggaaacactagaacttactctgacatgccctatggaagttatttctccactgctgttcaaacccactcccagacctggccttccctgaggagagcgtctcagccaaatccaactgcctctagctcaagtttccttgcggggggcccgctggcctcatcctgttaggtcgtcttagagccacaggagaatcaatgttccagtgtcagcaggaagaatcaatgttccagtgtcagccagcagggggcagtgtgaaaatacacacaccaggcccttttttcaaagggtctcggcttccctgagggtgtctatctgtgcctctatgaagcatggcttgggtcattcctccagtcccatggccaggtggatccttcgtttacctttcatttctattaaatgagaacattctcaattcactaactggattgttggaaaggcagcaagctctgctagatagttctaaatatttgcatcaaatatggaccagaaattgtgaatctgtctttcaacgccctcggatctgagtcagcaaggctgccacgtgcaaaagtaggaacgttaaatacttgaagctgggagagaataagtgggtttctaatcctctctggtgcattcagttctagaaagtggttctttgtattctactggaacatttctatgtatggtttttttgttgtttgtttgtttgttttttgagacagagtctccctctgttgctcaggctggagcacagtggcacaatttcagctcaccacaacctctgtctcccgggttcaaggaattctcctgcctgagcctcccgagtagctgagattacaggcacgtgccaccacgcccagctaatttttgtatttttggtagaggcagggtttcactatgttggccaggctggtgtatgtatgttttaaacatgctttaaaacaaaatttctttttagagatgggatcttgctatgttgcccaggctggagtgcagtggctattcacaggtgtgatcatggcgcactgaagcctagaactactaggctcaagcaatcctcccaccctagcctcccacgtaattgagactacaggtatacaccaccatgcccggccttaaacatgcttttaaatgtgtcataaatcacatttctctgatgaataaaaagaattatctaatgttgagaaagagtcagtgtttaatcatttacctcacagtgcagatttcttaataaattctgttattgaatctacagaatttaacattatgttatttttggccctgaaggcataacttcaagccattctggatactgaatgtgttgctgacatacacattagcaaatcactcagaagcatatacactttattgcattatcagtaacatgaagaaatatttctatatcatgagaaagagcactttcttcttgatatgtgtgtaatcccttggtcttgggaagctaaggcacagcttacagagggattttgtataccccactcattacgtagcttaaatcaggctgggtaaacatgtaaaccaaatgcaaatcatcaatctacatatgtttaagaaataatatagacatactgctgaagcatgcctcccagggagttctggactttaaacagcatcttataaatcaccagcaagaacaatcaattaatattttggctgagggtctttaccagactcccaaataccactggagttaagcactgaaccaacacaggccagctgcaaataagattcattgctatggtttggatatttggcctcccctccaaagacaatatcatgttgaaatttcatccccaatgtcagaggtagggcccactgggaggtttgggtcatgggagtatatctctcatgaatggcttgctgccatcctcatgggagtgagttctcactcttagttccctcaagagctagttgttgaagagtgtagaacctcctcctccctcctcttgcctcctctctccccatgtgatctgcccacagtggttcacctttcccttccaccatgagtagaagcagccggaggccctcatcagaagcaggtattggtcctatgctttttgtacagtctgcagaaccatgaaccaagtaaacctattttctttatacattaccaagccttaagtattcttttataacaacacaagcaggctaagataaccccatctatggtcagtcaccaaggcctcttctctcatatgagttttgtaccttactctatttaataaagtttgttctcatggggatatgcattaacaattctgatacgtgcatactgaaatcgaaaattaattaaacaaatggcggatggtagaagccaggttgctcactgttggaatgcaagtttacagataagccaggggaggaggctagaatgatccacttggtaacagagcggagttggaggcatcagtatgaactcatgtctagcttaatacaggggcagaagattccatatagaaatatgtatagatatgtgatattcacaggttagtatacacatgaatatttccttgctctgtcatctgagaaggactaaaagaaacagcaccccagtagcaaaaagcatacctagcacccagaccttggtttctaataacactctccagtgaaaggtaccagggctccttggagaaatggccaattctatgcctctgacagaaatatgcaagaggagcctggagtattttgtagtgccagaaaataaggaggcactcaaaaacaatcaaaaaacaaatgcatattaatggagctacatcaaagaaacacaggagccaactgagagtgctcccaacggccaaagctggaacaatttgagcaacaaaataaagcagtgctggattatcattcaaagtataaaataaatacccctgagtcctcactattgcaaataaatgattgaataaattaataaatgggggaggagagacaagtcccttggactgataaatttcaaataatttatgcagatactctgcctcaagggggtgaggcataactcctgactcattaaatgtggagtaagcatagtgacttccttcctaagaggacagtatggaatgggggagaagagtaaccttagagtggaggaccctgacacatacgacctcagccaggtgatgaaggtcaacatcagtggtgatcaatcatgttgatcatatgtacttctgatgtgatgtgaggaaagcagcactttacttctgtggacttcctctcaaaaactcataaccccagtcaagtcaagagaaaaacattagacaaatttaataaataggcatttgggaaaatatctgagcggtacttctcaaaactatcaaggtcaccaaaaacaaggaaagtctaagaaactgtcacagctagaggagcccaaggagacacgatgatcatgtatcagtgctggttcattccttctaacaaatgtgccctactcgtgcaagatgttaacaaagggaacattggccatgggtatatgggaacaccctgtactatcttctcaatttttctgtaagtttgaaacagttctaaacaaaaaaaagtcttttaaaaatacaatcaaggccaggtgcagtgactcaggcctgtaatcccaacactgtgggaggaccacttgagcccaaggagttttaggccagcctgggcaatggggggagaccctgtctctacaaaaaattttaaaaattaatcaggtattgtggtgtatatctgtggtcccaactactcaggaggctgaggtgggaggattgctggggtccaggaggccaaggctgcagtgagccatgatcgtaccactgcactccagcctgggtaacagagcaagaccctgtctcaaaaacaaaaacaaagaatctataaataaatgaaaagattaatatccacaaaaggacaaatattgtatgattccatttatatgaggtagctcgaataggcaaattcttaaagacagtaaatagaatagaagttacaaggggctgggagggggaggaattagagcttattgtttaatgcactgcactccagcctgagccaaaaagtgagaccctatgtgaaaaaaataaataaatacataaaaatacaatcaacagaagaaaagaaagtatttacaatatataacagataacagattcctatatagactgtataaaaaacttccagaatcaatgaggaagagaaataacctgattttaaaaattggcaaaggatgtgaaaaggcaatacatggaagaaatacaagtgtccaaaaaacataagaaaaaatacttaatctcactaataattggagaaatgcacattccattaaaataccagtaagactgatttctcttctcactttaaaggtctggtgatatccaatgttagcaagggtgtgaagaaacaatgaaaatgtatccatacaatacttgtgtaattaagtataaattgacaagggtgaatttttaaggaaactaagagaaaaagaaaggcgtgatccctttgccccattgtaaaggaaactatgactcaaaagtaacgggtggctatctaaatgccaataagcacataagaaggtgcctaatctcactcatcatcagttaaatgcaaattaaaactatacccagatgctactatgtaccaggatgactgacaccaacattgatgaggatgtagcacaactacagctcccatgcactattggtgggattggcacagctcactttggaaaacaactgggcagtatctattcaaactaaacatgctcattttatggcccaccaattctacttctcagtaaatactcaacagacgtgagagcttatggctcccaaatgatacatgcaaaaatgttcatatccaccttattcacaatagctacaagtaactcaaatgtccatggatagaagagtagctaaatggtggcatagccatacaatggactactacacagcaaccaaaaagaagagactattaccacacacggcatgagtgaatctcatgggttgattgctaagcaaaaatgtcatgcaaaaaatgatatattgtacagctccatgtctatgaggtttaagggtaggcagagctaatctaaggtgatagaaactagaatagtggtttccttgggaaggaggtacaggcagatgatatggccttggaggaggcttgagagcccagtgggaagatgaaatattctatgtctgcatctggctggtggtcattcaggtatagacatgtgtcaaaacttagcaaccttctcacttgagatgtgtgcactttatatctgctctgtatcagttaacacatacgttaaaaagaggaaataggtgagtttttgaagatggaataattactacaaaatgagagtcattgattgtacctgctgcacgtgtggagaccagatttcaaaggggaacattaaaacaggaggatgataaacaaaatgtggtctatctatacaatggaatgttattcaggcataaagggaaatgaaaaatgggtaaatcttgaaagcattaagacaagtgaaaaaaaacagacacaaagaaccatatactggatgattccatttatataaaatgtccagaataagcaaatccatagagacagaaagtagcttagtggtttccaatctacttcccagagggaagagaggaattggagagggactgttaatagatatgggatttatttccagggtgatgaaaaaggtctggaatcagagagtgatgattgtacaactctgtgaatataccaaaaaccactgaattgcacactttatgagggtgaattttatagcatttgcattttattttattttattttattttattttattttattttattttattttattttattgagagaaggccccactctgtcacccagactggagtctgcaatcatgttttctacttattggtcaagacgccagtcccgctgactgctcagtccccaagttgttctatttaccacatccttttaggaagagaacatctagggcaccttctcctctcagtgaggcactgcaggttcccataagacctcagccacgcctggctaaggagagggcccagttgcccctgctgaaaagggctcactgcagctctgggagaggctccttctctgggcgtcttcctcagatgctgaacgatcaagtgggatctggagctgcccggagtcccctcccctgaccttcaccagtcaggagtctgggaggaacagctcattcaaatatgcacccaacgtggattctccctccacccactgacagaaatggctaatggagccccaaaatcctgcagagtttaattaccaacctgcaaagacaggctgtcagctccagtcctaggtaaagacctatgggaaagggtgttaggtcaacccaaagacagacaacaatgtccacagcaggtctgtcatcatagccgcgttttggaaacaaggtgaagtccatcaacagcaggctaaatgcataatttgtggcatagacactcaatggaacactccacaggaagaaaaggagtgaacagctgccccgtgcaatagcatggatgagcccacacatgatgccaaagaagccagacacaagggcatgcgctgtatgatttccatagggtgttgaatagcatctccccaaaactcacatccacctagaatctcagattgggactgtacttggaagtggggtctttgcagatgtaactaaattaagatgaggccaccctgaattaggatgtgtcctgaatctaatgaatggggttcttataacaagaggagaggacacagagaatgaggccatgtgataatggagacagatattggagaatgatttcactacaagtcaaggtacacccaggactgccaggagccaccaggagctaggaagaggcaggaaaggatcctcccctagacccttcaggggaagcacagccctgctgaccccttgatttcagacttccaaactccagaattctgaaagcatcagtttcggttgttttaagccacatgctttgtggttatgtgttacagtggccccagaaaaccaaaatttcattgaatgaaattcaagagaaggcaaagctaatccatagagatggaagctcaaatactggtagaggatggtcctcatctcggaagagaaacaaggaagacttcaagggtgttcaaaatgcatcctgttccaggtggtagctacctagtcatagacacatggaaaatttcactgaattatacagttaaaatgtgtgcgcttccttgcatggaagtgatacttcaataaaaatttaaaaagcaagaagcaggctgttccactggagctacaaactactttgctcttttttctttctttccttgtcttttgtagaaatggggtctcactatgttgcccagggtggtctcaaactcctgggttcaagggactcgcccgcctcagcctcccagtcagtgctgggattataggcatgagccactgtccccagccacgctttgttcattcttgaaggaaatctctatgatgttcaacttgttcttgtcactcaaaatgaccatcccctgccctctataactaccagtagaaacaagatctctagcagcacttttccaagattgggttttccccagaagcacagcctgagacaaggatttgaatgcaagtgctttgcatgggagcacatggggaagggagaagggagatgggaagtgtggggaggagcactgtgccacccaccctggggacccactgagacaccacaggacacacctcagaatctgcccaccaagtagcaagggagctggagcctttattgaccaacagccctgcctcacagggtaagggtggctccaagcacaccagagaaagaactcaggcagagagaggcaggagcctctgcactggcctccagcctgggctgaggccatatgggccgggaccttcgtctctaggtacaggccagggaaaggcaagacctggctggccttgagctctgccctcttgtttgggggatcgaagaaccagggatgcagtatactgagaatttcaagttcacgaactttcctcccctttcttagcacacaaggtccctctccatatggacacagggaaacctcaccccccaaggcacaactgccaacacctttccatgagagcaaagtgacttcagcaaaaacatcaggtgaggatgaagattgtccagaggaagccggccccaggctctccagggctccattgttctctgcatgtctcagagctgtccagggcatggtgcgggccagctgaaggaagctttggctccgggttttgtcctctcttcctgctggtgggaagaatgggagctggcaggaaaggaaactgactgaacaaagagaaggaggaaaatcagaggacccctggagagatgttacagctggcctgagagctcattgtgttggagtgggggaagaaagccattcccgggaatatgcctaaaaaatgcaagagactcccatgcccgtcaccatcaaaccaggcactagcccgagaatttgacttcccagatctcaaaggggacttaaaactttgggtccaaaagacaagattttttttccatttgctttaaaactcttgttgaaaagcagatgttaagtctggggaatcatgtgttaaccaagaaagaggtttcttaagtgcatcagccaccatccatagctgggagcaaagctaagcttgcaagttggggccaggaatatgtagacaaggactccgaaaggtttatgccatgagcctacacacgagagggactcaggggccttgagcatccaggtatccaagctctggtgccacagtactgggggccattgctcagaactgaaagccttgcaacggcaaactgcaacaccattcagatacctgaggcactcctctggggcatggccatgacagagactgtgccaggccccagaacactttgcttctcttaccagctgtgtgtgactttgagaaagtcacttatcctcgtggtctctctgtttcctgatctgtaaggtagagatcttgacctgcttcatggagttggtatgagaatgccaagtgtttaatgcagtgcttagaacatagtgagtgctccacaatatgagttactgcactgatgcagtatgtgtgctcacagtcaaatgccacatgcccaacccaccatctaccttcctttctctccattagatttccagggatggctttttgggggaaaggaattggtaactgacatagttttccatcacgctccaagccagaaatcttgagatcctatgatacccactcaaaaatgcattattaatccagttctcagcaacttctactcactaccatcatctttcatctggatgtctacgacagcctcctaactgatgttcctgcttccattcacaggaacagaaataatctattaaaagtctaaaatctgactcaccctctctccttaaaacttttcaaaaacttcccattgtacctaaatagaatccaaactcttgcactggcttcaaaagccctgtgcctttctacaaggtcactagacccctatttccctgacaaactctgtttcagccatgcagtttctctgtcagttcctgaaacacaacaagttccttctagcctcaggacctttgtctgtttccactcccttccctgcattacgtgacaagctccttctcaaacttcagatctcagcctaaatgtcagctcctcaccaggcttctccaggccattctctctaaagtaggctccttctgctactgcatcattatctgtttccagttcgccattctcttcttgtatcagtcagctatcgctgtgtaacaagccacctcaaaactccatggttaaaaacaacaggcattcattatcactcacaactgcaggttggctggggttcagctgggcacctgtgctcctcatggaagggctgtgggtcaggggaggccgttctgttccacatgtctctcaacctcctgctgggatgagactgggcccgtttttctcatggtaataacagaggaacaatagagcaagcagaaagatgtgaactctctcaaggcctaggctctctcaaggcctaggctcaaaacagacacaacatcctttctaccacattttatgggccaaagcatatccttgtgatcaagcccaaactcaaagagtggggaaatgccctccatccatagtgaggccaggcaggcctgtgtccacagggaggatggataaaaaaatgtgggcagtcattcaactgccacgatttgtgattcatgatgaatatttttgtttctccactctccactagaatgagcaagcaggaacctggtatccacagcacctagaacagtacctgacatgtgacagatgctcaacaagtcccttattatacttttgttttgttgtgttttttttagagacagagtctcactcttttactcaggctggagtgcactgccgcaaacacggcttactgaaaccttgaacttctgggctcaagcaatcctcctacctccacctctcaaactgctggcattacaggcatgagccaacatggttggggccctttattatacattgaatgaactcctagactggaagcccatgtgttacctctagatgacaattgtcctataaaaccatcatgacagcaattggcttttcagatatggctttttaatttttttattattattattttttagctctgttgcccaagctggagtgcagtggtgtgatctcggctcactgcaacatctgcctcctgagctcaagtgattcccctgcctcagcctcccaagtagctgggattacaggcgcccaccaccacacacagctgatttttgtatttttagtagagatggggtttcaccatgttggccaggctggtctcaaatttctgaacttaggtgatccgcccacttcggcctcccaaagcactgggattacaggcatgaaccactgcacctggactcagatatggcttttgttgaatatggactcagatatagacaaacttttgcttaacgatggagtcttttattaatcaatgggcaacttcacacctacttgttagcaattgcttggacatggtcctaaggactacaacagccacttcccaatccagggcagaagaaaaagcccatgaacatggccctgactgggacaaggaccatgtgaggcattctctactatggacacaacagaactgatgaaattcagagcaggacccagctccaaattccccttgtccaaaacctgcttattctttaagggggtgggggctgcagaaggtaaccagtggacaaggtgcaaaggttgttggggtccctcttcatacctccaagaagaatggggcagacaggaaagcagctgggagctgcctttggagtgaagagtcctggcttggccaatgagcaccagtgtaactttggacaaggctgttgacctctgaggtccttaccaacccaaagggcagtagagtaaatcaaaggagaggagcaaaaggaagcccacacctgtgctgaggctcgctggtcctcatccaggttcagaagcagtgttctccaaacttttcaggttggacacccactcagtgagcattctcaatatgtgctgatgcttatgtataacattacatacatgtacttttaaatatcattcattttaatggttcatcttctcaccctcttgcacttgtgtaacaggactatcttcatctttttttttttttttttttttttttgcactcacgcttaagcctcttaggatttttgtgacagttttagtctaagtaaaactgaaaaaaatactgaaaaaaataatcatttctgccacttgcatggtccccaccaaggcacttctctaaattattttagatgcatttagatcaggggcaatggctcacacctgaaatcccagcactttgggacactgaggcaggaggatcacctgatcccaggagttcaaggctgagcctaggagttcaaggctgagcccaggagttcaaggctgagcctaggagtccaaggctgcagtaaactatgatcactccactgcactccatcttgagtgacagagagagaccatgtctctcaaaataaaaataaaaataaaaatacacgcattttttaaattttcatttttccataagttattggggtattggggtacaggtggtgtttggttacacgaggaagtttttttttttgtttttttttttttgagacggagtctcactgtgtcacccaggctggagtgcagtggtgcgatctcggctcactgcaacctccgcctcccgggttcatgccattctcctgcctcagcctcctgagtagctgggactacaggtgcctgccaccacgcccagctaatttttgtatctttagtagagatggggtttcaccatgttggtcaggttggtctcgaaccctgacctcatgatccaccctccttgatttcccaaagtgctgggattacaggtgtgagccaccacacccggccattacatgattaagttttttagtggtgatttgtgagtggtgcaaccatcacgtgagcagtatacactgcaccatatttgtagccttttatccctcacccacctcccactcttccacccaagtcctcaaagtccattatattattcttttgccttttcgtcctcacagcttagctcccacatatcaatgagaacatacgatgtttgattttccattcctgagttacatcacttagaataatagtctccaatctcatccaggtcactgcaaatgctgttaattcattccttcttatggctgtgtagtattccatcatatatatgtactacggtttctttatccactcattgattaataggcatttgggttggttccacgattttgcaattgtgaattgtgctgctttaaaaatacgtgtacaagtatctgtttcgaagaatgacttcttttcctctgggtagatacccagtagtgggattgctggatcaaatggtagttctacttttagctctttaaggaatctccacactgttttccatagtggctgtactagtttacattcccaccagcagtgtagaagtgtttcctgatcgctgcattcacaccaacactactgtttttttgatttttttattatggccattcttgcaggagtaaggtggtattgctctgtggtttttatttgcatttccctgatcattagtgatattgagcatttttttacatgtttgctggccagttgtatatcttcttttgagaattgtctattcatgtccttggccatgtttttttcttactgatttgtttgagttcattgtagattctggatattagtcctttgtcagatgtatagattgttttttcccactctgtgggttgtctgtttactctgctgactgttccttttgctgtgcaaacgctctttagtttagttaggtcccagctatttatctctgtttttattgcatttgcttttgggttcttggtcatgaaatacttgcctaagccagtgtctagaagggtttttccaatgttatcttctagaatttttatagtttcagatcttaggtttaagtccttaatccatcttgagttgatttttgtataaagtgagagatagggatccagtttcattctcctacaaatggcttgccaattatcccaacaccatttgttgaaaagggtgtcctttccccactgcatgtttttgtttgctttgtcgacaaccagttggtgtaagtatttgggtttatttctgggttctttattctattctattggtctatgtgcctatttttatgccagtaccacgctgttttggtgactatggccttagagtatagtttgaaatcaggtagtgtgatgcctccagatttgttctttttgcttagtcttactttggctatgtgtgctcttttttggttccatatgaattttagaattgttttttctaattctgtgaagaatgatggtgctatttgatgccgattgagttgaatttgtagattacttctggtagtatggtcattttcacaatattgattctacccatctatgagcatggaatgtgtttccatttgtttgtgtcatctatgatttctctcagcagtgttttgtagttttccttgcagaggtcttttgagtcctatgttaggtatattcctaagtattttttttttttgcagctattgtaaaaggggtcaagttcttgatttgattatctgcttggtccctgttgatgtatagaagggctactgatttgtatacattaatcttgtatctggaaacgttgctaaattattttatcagttctaagagctttctagaggagtccttagggttttcaagataaacaatcatataattggcaaatagtgacagtttgacttcctctttaccagtctggatgccctttctttcttttctttctttctttctttctttctttctttctttctttctttctttctttctttctttctttctttttttcctctgagatggagttttcactcttgttgcccaggctggagtgcagtgacataatcttggctcactgcaacctccacctcctgggttcaagtgattctcctgcctcaggcccccaagtagctgcgattacaggggcctgccaccatgcccagctaatttttctatttttagtagagatggggtttcgctatgttggccaggctggtctcaaacttctgacctcaggtgaattgcccacctcagcctcccaaagtgttgggattacaggcgtgagacaccacgcccggcctggatgccctttgtttctttctcttgtccgattgctctggctaggatttccagtactcttgaagaggagtggcgagagtgggcatccttgtcttgttccagttctcaaagggaatgctttcaacttctccccattcagtattatgttggttgtgggtttgtcatagatggctttattacattaaggtatgtcccttgtatgccaattttcctgagagttttaatcataaagggatgctggattttgtagaatgctttgtctgcatctatcgagatgatcatgtgatttttgttcttaattctgtttatgtggttatcacatgtattgacttgcatatgttaaaccatttctgcatccctggtatgaaacccacttgattagggtggattatctttttgatatgttgttggattcgactagctagtactttgttaaggattttagcatctatgttcatcaaggatatcggtctgtagttttcttttttggttatgtcctttcctggttttggtattgggtgatgctggcctcatagaatgaattagggagggttccttctttctctatcttgtggaatcctttgaatgtctggtagaattctgccataaatctgtctggtcctggacttttctgttgtcggtaatttttaaattaacatttcaatctcactgcgtgttattcgtctattcagggtatctaactcttcctgatttaagctaggagggttgtattcttccaggaatttatccatcttttctaggttttctagtttatgtgcataaaggtgttcatagtaggcttgaatgttcttttgtatttcagtggtgtcagttgtaacatctcctgttttgtttcttagtgaacttgtttggattttctctcttcttttcttggttaatcttgttaatggtctatcagttttatttatcttttcaaagaaccagctttttgtttcatttatcttttgtattttttgtttgtttgtttcaatttcatttagttctgctctgatcttggttattttctttcttctgctgggtgtgggtttggtttgttcttgtctctctagttccttgaggtgtgaccttagattatctgtgctctttcagactttttgatttaggcatttaggactatgaatgttcctcttagtaccatctttgctgtatcccagaggttttgataggttgtgtcgttagtcattcagtttgatgaatttttaaatttccatcttgattttgcttttgatccaatgctcactcaggagcaggttatttaatttccatgtatttgcatggttttgaaggttccttttggagttgatttccagttttattccactgtggtctgacagagtgcttgatataatttcaattttcttaaatgtattgaggctcattttatggcctatcatatggtctatcttggagaaagttccatgcactgttgaatagaatgtgtattctgtgattgttggatgaaatgttctgtatatatctgttaagtccatttgttccaaggtatagtttaaatccattgtttatttgttgactttctgtcttgacctgtctagtgctgtcagtggagtattgaagtccctcactgctattgtgttgctgtctatctcatttcttaggtctattagtaattgttttataaatttgggacctccagtgttaggtgcatatatgtttaggactgtgatattttcctgttgaacaaggccttttactattatatactgttcctctttgtctcttttaatcactgtttctttaaagtttgttttgtctgacataagaatagctacccctgcttgcttttggtgtccatttgcaggaaatgtctttttccacccctttactttaagtttatgtaagtccttacgtgttaggtaagtctcctgaaagcagcagatggttggtgatttcttttttttttttttttttttttttgagacagagtcacactctgttgcccaggctggagtgcagtggtgcaatctcggctcactgcaacctccacctcctgggttcaagcagttcttgtgtctcagcctcccaagaagctgggactacaggtgcatgccaccatgcctggctaatttttttttttttttgtatttttagtagaaatagggttacatcatattggtcagactggtcttgaactcctaacctcaggtgatccaccctcctcggcctcccaaagtgctgtgattacaggcgtgggccaccgcgcccagccggttggtgagctcttatccattctgcggttctgtatcttttaagtggagcatttaggccgtttacattaaatgttagtattgaaatgtgagggaccattgctttcattgtgctctttgttgcctgtgtactttggtttttgtttttgctttttaacttgtatttttgttttataggtcctatgtgatttatgctttaaacaggttctgttttgatgtgtttccagaatttttttcaagatttagagctccttttagcagttcttgtagtggtggtttggtaatggcgaattctctcagcatttgtttgtctgaaaacaactgtatctttccttcatatatgatgcttagtttcgctggatacaaaattcttggctgataattgttttgtttgaggaggctgaagatagggccccaatccctactagcttgtagggtttctgctgagaaatctgctgttaatctgataggttttcctttataagttacctggtgcttctgtctcacagctcttaagattctttccttcctcttgactttggataacctgatgacaatgtgcctaggcaaagatctttttgcgatgaatttcccaggtgttctttgcgcttcttgtattgggatatctaggtccctcacaaggctggggaattgttcctcgattattcccccaaatatgttttccaggcttttagaattctcttcttaggtacaccgattattcttaggtttgattgtttaacataatcccagacttcttggaggctttgttcatattttcttgttcttttttctttgtctttgttagattggattaattcaaagacttgtccttgagctctgaatttctttcttctatttgttcaattctattgttgagaatttacagagcatttcacatttctaaaagtgtgtccaaagtttgctaaatttttattgtttttttcttttagctatctatttccatgaatatgtctcccttcacttcttgtatcattttttggatttccttgcattgggtctcgcctttctctggtccctccctgattagcttgataactaacctcctgaattattttgcaggtaaatcaggggtttcttcttggtttggatctattgctggtgaactagtgtgattttcgggaggtgttaaagagacttgttttgtcacattaccagagttggttttctggttccgtctcgtttgggtaggctctgtcatagggaaggtctagggctgaagactgttgttccgattctttcatcccactggctgtttctttaatgtagttctctatcccttttcctatggatgtggcttcctgtgagccgaactgcagtgatttttgtctcttttctgggcctagccacccagcgagtctacccagctctgggctggcactgggggttgtctgcacagagtcctgtgatgtgaactgtctatgggtctctcagccgtggataccagcacctgttccggtggaggtggcggagggtgcactggaagtcgtgagggtccttagctttggtggcttaatgctctatgtttgtgctggttggcctcctgccaggaggtggcgctttccagaaagcatcagctgtagtagcgtggagaggtaccggtgttgggtgagtccctagaactcccaagattatatgccctttgtcttccacccagggtagatagggaaggaccatctggtgggggtggggctaggcgtgtctgagctcagactctcctagggcgggtcttgctgtggctgctgtgggggatggaggtgagattcccaggtcactggagttgtgtacctaggaggattatggctgcctctgctgaatcctgcaggttgtcagggaagtgggggaaagccagcagtcacaggcctcacccagctcccacgcaaactaaagggcccgtctcactcccactgtgcccccaccaacagcccagtctgttttcaggctgcaggtgacaggcttgaaaacttgcccgaggctatccgcctcccagctgggagagaaaagggcttcagttcttcccctgcttgtgaagtctgcccgctggattcgcaccctccccaaagttctggccaggaggtttcttgccccattcaaattgttacaaaattcagctggggaattccttctccctgtggagttttatcccctgctcctctagccacccttctgatggatccctgttatgccaggcaggaatgggatgcttggggacccagcgagctcccagggcctttctgctacttcctgtacccctgtctttcggtcggctctctaacttgactcagctccaggtaaagtcagaaacttcccccacaaacagaacttcagcttctccactgggggtgtgtgttcacttcctcagttggggcactgacagtatttggggtgtctccccggccctgcaggagcgctctgcttccttcagaggatctgtgcgtcctcttgggagtgctggtttgttcttgtagtggatctggagctaaaattcacagtgtaagcccccacatgctgctctgtccagagctgcaatctagtcctgcctccagtccgccatgatcccttctaatctgcacttaaatattttaaagatgtttaatccctgaagcagtcccatgagatggatactaatattacgtccattaagcagatgaagaaatggaggcaggcagacagtatccaaggtctcactgcaggggagacaggatttgaacctggaagtctggttcagaaggcatcaaaacacaccaggtgtgtcaaaagctttaggtcccaaactactgagcccagggaaggtgtctcgtgatgcggggctgacacacaaaccaagtaaagacaccaagaccaaatgtcactatttttgagatttaaaaatgttaattatatcaagatagaagttatagtctttttcctcctcactttggcgccactgctaggaagagcgggggagcgggcgttgcaccgcgtccgggccacgagggggcgcgcggacaccacccaccccgccgggcaaggccaccctcccagacgcctggcagccggaagaaccgcacgaacgccttccgcagagctggtcctcgggagccctccagcccacccaggtctttcctagccccaaatccttcccagggacgtcctcgggacaggcaaacctgctgtaacattcagctgatataggaggtggaaccctcctacagtcacagagacagaaagtgccccgagggcgtcgctctggtcctggcggagatggtctctgatggtctgccttgatgacttatggggacacctgtcgggggttctgctagaaagaaagatgcagagcgcccctcacgcacgcaaactctagctctcacacccagacgtgctccaaacattccaaaggggccaaaaacgacgtctggcttttccgcggcgcctcctggccctggcggtgactccgaggtggcgctttcagggtgggcgcgagggagaggaaagcctctggcatcctcacccccggggccagagggacagcgggtgccctccgccccgagtcacctgcgtcttgaattctgtccctccaaggagagggcaatgcctgagcccacggaagttgggtcaggggcagcattggaagtcagagcctgcaatgctcacgtaaatgcaaaagatggttccttcagtgccagtaagaaggctgtcttgaacatgaggaatacagcagcaagcaagacagagaggtgcctgctttctggggagacaacaaacagataaataagcacaacactgtcctgccaagctaagtgacatcaatgaaacaaggcaaggtaataagaagaggctgggaaaaggcttagctgtgattttgctttctgcagtttgagttgcctatgttcaacagaggttcaaaaatattaaatggaacatttcagaaataaacaatcctaagtttaaattgcatgccattctgagcagcgtgatgatatcttgcgccatctctcccagtcctgccccggagatgaatcatccctttgtccagcgtgtccacacggtacatgctccaggcccgttagttacttagtagccatctcagtttttcggatgacgtcgaggtatggcagggtttgtgttcaaagtcacccttgttttacttaacaatagcttcaaagcacaagcatagtgatgctggcaatttggatatgccaaagagaagctacaaggtgctttaaggggaaaagtgaaagttgtggacttaatcagcaaccttagctgaggttgctaagatctgtgataacaaggaagctttgattcatgaaattctggagatggaaaaaagaaatatatgctagttttgctgtcacacctcggactgcaaagtaatggccatggtgcatgataagagcttagttaagatggaaaaggcattaactctgtggataaaaacatgaagagacatgtgttctgattgatggcaataaggatcagtattatccgtggtcccaggcatgcactggaggtgttggaatgtatcccccatggataaggggagactatcgtatccttgattggggcattgctacatggatgtatacgtttggccaaactctccaaactgaacacttaagataggtgtgtttcattgtacgcacatttttcaacaaaaatcttttctatataagaagaagaatagctgggaaaggaagacattaactagggtgatcaggatggtctctttgcaaaggggacatttgagctgagacctgaaaagtgagaatgaactagaaggagttagccatgccaggatcttgtctcttcctgccaagatgctgcaggcagaggaaacgctgcattggaagggcccccggtgagaatgcaatgagggcatggggagaccgttgtgagcaaagggagcaggagggcaggtacgcaagaggaggttgaggctgtagccaggggctgctgatgaggtacttgaagtctgtctaggtctaagttcattctaagtgcaattggaagtcactgggggaccacatggaggaaagatacaggtccccaacccgatcagccttgggaccacctccaggcagagtctaaagaaggatagccaggcacggtggatcacgcctataatcccagcattttgggaggctgaggcaggcagattgcttgagctcaggaattcgagaccagcctgggcaacatggtgaagccccatatctacaaaaaatacaaaaattagctgggcatagatatgcctgtagtcccaactactcaggtggctgaggcaggaggatagcctgagcccaggaggttaagtctgcagtgaaccgacattctgccactccactccagcctatatgacagagcaagaccctgtctcaaaaaggagaaaaaataaataaataaataaataaataaataaataaataaaatatagcctaaattccaaataccaaataccagagaccaaaattattggccttgttaagggaacatctcaatgtttgaaatgtcattgcatttttctttgtttgtagagacggggtctcgctatgttgcccaagctggcctcgaattcccaggctcaagcaatactcccaccccagcctcttgagtagctgatactacaggcaggctccaccgctcccagcttactagactgtgtaacgggtcattttctgtactagcttgttgtggttacaaaccagccaaatggcttacgtttgtatttattttctattccatacgtctccgcccaatgtttttcctctcaaaatcccttcctttaaaaaataaatctgttgcagatgtggggaaaaaaaaaaaaagagccagaagaaaagggacaaagccgagtgctatcagcaggaagggcattgcccagccactggcctgaattctgtgaatacccccacctcggggtccacaggatgggcctaaggaggtctggcattccagggaacagacacctggttggtccacacagggaaaactaggggtttctgtaatgtcagcaggtggctgaaaactccagagtgcctgcaaaatgctttccctcatactttctatctggcaggtaccttggagttgacagccatgtgctcagaggagaatgaagcaaaccaaccaaaagccaaccccaaacacccaatggcctgagctcctcagagcaagaaaagtcaagttgaatatctcagatggggccgtcagagaatggagatgacctcatccacagtgggacaagttggagcaaatcacttggatggaaagcaaggaaatagaggggcaatttcagcatgtccctcaggcttccacagaggaaggtttggccttccaaattcccaaagggcttctctcctgggacgcactgtctctgcagaggtgaaaacactctttcttgtctctctctgcctgggatcttaattgtttccagtgtcaaatgaaggactgaggaaagaaccaaagcttccccagttcactaactgctctgggatttacccagaattttgacagcattgagatttggagttggcttagaagaagagaagaagggaagtggaggtgctgagagctggtctggagttagccctgcttcagccacattcacttccctttgtctctcatgaccgggcaatgcagtaggcttcccatgttgtgtatcttcttgtctattaaacagggttatccagctgattgagggcatttcttttttttttttttttttccaacctcactttttccaaactagtttagatcttccagagtgtggtaggctgaaaaatgtcccccaaaaatatcaggtcctaatccctgaaacctatgaatattgtcttatatgggaaaagggtctttgcaaattgggttaagtcaaggatcttgagagagggaggttattttggattattaatatttaggtggaccttaaataaattccaagaatgtcatctggagtggaggaaaaaggtatttctttttaggatgtccaggaaattaaaagatgatgaaatgccaaaacaagttcacaaaagtgcagaatagtttaaatattgacatctaatatccactcaccatgtctgtgcacatatgcctctaatggccatcaactgtgtcccttggccttcaggcttttttggtcaccagagcctgctctgcttgtgtacactgcagatgtctcagggaattaatgcctctctggcccccaagagcagccttcaaccaatgcctaacggaagttggtatataaataccccaactccctcacccctaggtggagaaactctggggtaccttctacactggctcctagaggtctccactgggactgaactccagttgcccaccatcagaacttatttaatgacacacccaaataagcttccttcccctcctattagacttccccactccacttccactgttttctagaatcaagtcccaaataaactactagccctcaaatcctatttttgtttgtttgttgtgttttttgttttttgaaatggagtcttgctctcttgcccaggctggagtgcaatggcaccatctcagctcactgcaacctccgcctcccaggttcaagcgattctcctgcctcagcctcctgagtagctgggactacaggcgcgcaccaccactcccggctaatctttatatttttagtagagatggtgtttcatcatattggccaggctggtgtcaaactcctgaccttgtgatccgcccgcctcagcctcccaaagttttgggattacaggcgtgagccaccgcgcctggcccaattcctggccttaatgtctgcttctgaaggagcccaagctaagaccctattgcatctcatttagtgagaatgtcaaaagcatgtattaaaggcccttcatgaatttgatcctgagtcaaatggccctcctggccctctcatatcaggaggcaactggggcagagttggaaagctgacccaagccatggtgtagtttcagtggcttgaaggtgatggaatgcatagccatgtgtgcgaaaatgaccacatgggcctgtgggacaattgtgcagccaaatgcctgccagaccttgaggcaggtgtgctcccctgctgggacttcaggagagaggccctgctgcctccgcaccttccaggccccggggacatccagggtgttctgctgaggtggaagggttgtgccctatcagccaagggcatgcacctcacctgcagtggctggaatgatggagatgcaggagtaatgaactttatctcagggagggggcaaacctaggttccacaactagtatctgccccaaatgtcaagccccaagccaaacccctgtgactaaagaaaccttcaacaaatcttgtaaggccagcagctcccctccatttgtttttgggtggggaaacacatgtgttttcttctgtaatcttctaaacatatagacttctaaagtcttaataattttttttttttttttttgcgacagagtctcactctgttgcccaggctggagtgcagtggcacggtcttggctcactgcaacctctgcctcctgggttcaagcgattcccctgcctcagcctcctgagtagctgggactacaggcatgtgccaccgtgcctggctaatttttgtatttttagtaaagacggggttttgctgtgttggccaggctggtcgcaaactcctaacctcaagggatccgcctgcctcagcctcccaaactgctgggattacaggcatgagccaccgcgcctggcctaaagtcttaataatctcaaactatagagcaaaaggatataggcatggcctgggggaccagtttaactttagttagactgagttaactagagtagagataaccaagtggtggcctacaagccaatacaagtgacaatcttttcctgtctaccacagtttttaaaaaccagagattctgataataatctgggtttctgggtttctggattttcttgaaaaatcaggaattcctgaatcccatggaactttcacttctacagggcagcattgcctgagaagtcagaatttgcaatcctgctagtagcagaaagtcagtccaaaagaggaaggtgtggtttgcaggaaagaggaaataaagatggagagagtgtgtgtgtgtgctacatgaaccccaggagatgacgaagacagacccctgctgacaaccagcaccaggctgagagtcaccccggagacaggtcctcaaggagatacaatggatagaatgctgggggagactgaacatatgaaaggtttagagaatttgggacaaatatgggctgaattcatgaaaaatacattgaaaacctaagcaaacagaaggacaatttttaacttcaaggaaaacaaaaagttgtgctaaaaatggaaaaataagccaaatacagtatacattcagctttagagagcatgtttatacaattatacaacataaaggcagatgtgcgctaaccaaaaattatgattggcaggacggagacccaagaattggggagggaggtagagaaagataaggccccagatgagcaaatcaggaagagaaacaccaacatgctacttacagataagatggcaagtaccaaagaatcagctagaagaattgaaggccgtgggaaggaaggggaggtagagcatggtaggagcaaaagagagctggttttgtttgactttcttaaccatgtgcatgtctatcattgaagaaaagacaaactgtgttttgaaaaaagttaattgatcacaagtaaagccgccacccccagcccccatccttgcctcacgataacccttaacaattatatccttccaacggtttatatatatatatataaagaccgttggggtttagagtcatttaaagcaaatctgaagttttaagggtccttaaggaggtataaggcttaagatctggccgggtgcagtggtttacgcctgtaatcccagcactttgggaggccaaggtgggtggatcacctgaggtcaggagttcaagaccagcctggccaacatggtgaaaccccatctgtactaaaaacacaaaaaattagccaagcatggtggcagacaactgtaatcccagctactcaggaggctgaggcaggagaatcatttgaacctgggaggcagacattgcagtaagccgagatcacagcattgtactccagcctgggcaataagagcgaaactccatcttaaaaaaaaaaaaaaaaaaaaaaggcttaagatctcttagagtctattgagatctatgtatctattaatatatgtaaggattttatatatatacaaagatcaacttttgtgtgtgtatgatacataaatagtatcatcatgtatgtatctttcaccaactattttcacttaacattacgtcttggcatctactttcagctagtagaattggtggggtgacaggtctgtaggctttaatatccttcctctacaaattctgaatgaagaaattattacacagacccatctttattaccaggacttgaatctcatttatatagtccattgaaactaaaatgttatctttcaatatgtccccccaaaaaagacagtattctggatcttgaattttctgggagatgcatttttggagcatccttcttgaggggataaagcagtttaagtcattgtccctgagcataattcatttataatatcccacatgaattcttgtcctttaagtagctactcctgggactttgcccccctctttttcaacatgcttaatgtcacactggcctgaagagcaactttactgctgcaggggtaacttatatttcatctcataaagcaccaaatctgcattattttttacctcaattccggatgaattttggtgattaaaatgagaaaaacatggctcgtggtcctcaagtggatttttggatcccggttcaaaagtggaataaatctattttagaaatgtgagttcatattactttataataacatcctcaggtgatgggcatgcacgtgggcccagggtagggagtgccgtggtgaagagtctgatgatgtccatcaggagtttcagagttagcctcacagttcagtatctttttttttttttttgagatggagtcttgctctgtcgcccaggctggagtgcagtggcacaatctcagctcactgcaagctccgcctcccgggttcacgccattctcctgcctcagcctcccaagtagctgggactacaggcacccaccaccatgcccggctaattttttgtatttttagtagagacggggtttcactgtgttagtcaggatggtcttgatctcctgaccttgtgatccgcccacttcagcctcccaaagtgctaggattacaggcatgagccaccgcgcccagccacagttgagtatcttaataatgttttatcattatttagggtttagggtttaagattggagttattagagtttagagcccttgggatcatagtcaaagttacatttgggaacaagaaagtctcagcgtagtctctgtcactcttcttgtatcattgggattattagggtgaaggtatctgatcattaagaagagagatgtagggttcggattctggtcacgatgtatgtggatctgctccaacttcttcacagagtttagagctcaggatcatttgtttgtggtaattaggcctttagggttgtcattgtcaaggggttcagggtcaaacatccattaatttatcatcatttggaatttggggtcttctgttgcaacaccaacaggatccctaaatcaaggttaaagtccaagtatacaaacagagctctggtctttgggtaacagatgagtcattgaggtatggaataatgagggtcaggacaggtcactgacgaggtgtctgctccattgcctgttagggtttaggattgttgagtccttaatgtccagggcgttggagttagcattaatgttgttgaggctgagaaggttgggttcattagacttgggttcctttgcaactatttaaggccactttgggtttaggataattttggatcaattagaatagtttagaataatttgggtattttaggtgcaattatgatttcttggatcttttagagtcttttggactgttggggtgtagagtcatttccagcaagtttaaatttttaagggcccttagggaggtataaggcttaagatctcttagagtctatcgagatacttagggtcatttagagttgtttgggttagtttagggtcatgtgagataatctggggcttaaggttttaagcatcatttaagaaactttagcatgtttagagttgtttaggatttaggattgtctgggatctctgagggtgttttagaatttagggtagttttaattgacttaggatcctttgggtttatatagcttctagctttgctattccaagtgtggcctgtggatcagcagcatccacatcccctgggagttggtaggaaggcagtgtctcaaaccgcaccctaggtctgctaaatctgagtcaatgttctaacaagatcctctccagaatcacaaaacttgcatattcaagttctgtggtagtttacaggcatctgaggccacttctaggtattaggtctctaaggttgttagatacattaccatagggtcatttaaatgattggattctttagtgtgcttagactctaaagaatatcctgaaattattcattcaggatattttatgcatttagagttaggattgtttagggttcaaatgtcttgaaagtcttacagagatttttaaggtttaggttctattttgattgcttagagctttttaggggtggtttatgtcacttggcaccatttatagtcatggaagattatttagcatttaaagttgttttgagtaatttatacctcttcagaatctctaagagcgtctgaagtcttataccactttgggtagtttaggatcacaaaggatttaggaccatttgaggtgatttcgatagcatgggatcatgtaagttcattttaagaaggattacacttgttagtgagtttgggtcaggacttagaggctgttagcattggcacacttggtgtttgaggtcttcatgtttatggtacatttggatatttattcgttcactacacaaatattatcaaggtgttgtaaatcaaagaaaatgaccgagatgggtctcaatcattttaagaggtttatttgtcaaggttaaggacacaaccaggaaaagaacacagaagctcaggaaaaatctgtggtcctttgctttttccaaagggcatctggagacctcaatatttaaaggggaaaaaagcaactattgcgggaaaaaggaaggaactttacaaaagggtgggcaatgagaaaggcaagcagttgcattcttttgagtcttcttctatcagcgttcactgaatacacattatacatgcaagaaaagggtagaggaatagtcacttatgcattcgtctgatgctcagtgaatcagcatttttacataaggtaaaataaacttagggcagaggaagcagtcaggtggacagagagatgacttttacttctgtcctttgtcctatccgtgtgaaggtcagggtgaaattcaatagaactcttttaaggtaaagatcttgggacccacgaggaatttccttgtgggcacattgtgagggaagtatgtagctctttttatctttgcagctatctttttctgaacaaaatgggaagcaggtttgcatgacccatttcctaacttgacttttccctttgccttagtgagttgggggtcctgaggtttattttcctttcacagtgtctaccaagaatcaggtgctgctctaggtggttgggatgccttcacagagcttaggttctagtggaggagatacataagtcaacgaatacattcagactgaaaaaaagcacttagaagagtgtggaagcagaggatagctggcaggagagcagctgatttgggtgttcggggaaggccttgctaggaaggaagagttgagctgagacctgaatcaaaaaggaggcaagcatgtgatgagcttgggtgaagagtatcccaaaaagaccaagtggcaagtgcaagtcccagaagcaggacaggtctggacatgcttgaagagcagcaaggccagtgtagctgatcccaagaggaggcctgaggaagaccatgtaggtctgaaactgacccagttgtcccatagagctgatgtttatggtttctttgaataaacagagaaattgatcctcccagtcttaaaacctgagaaaatgacacttgtcttatctgagttcctttctcaggaaaccagctatcaggccttctagatagcatcaaggatctgacactcaccagatcattgtatctagacaatgagaggcaaaacccccttacccatcatgattgtctaagcaaccacctgcttcccgttaatcaactcttcttgcttaccccttgctaattcctgttttcccacacatggttacatttatttcctgctatataaactcctaattttagttgctcagggagatggatttgagactgatcttccgtcttcttagctgcagcacctgatgaaagccttcttccttggcaaggctcattgtctcagtgattggttttctgggaggcgagcagtaggacatagactgaacccctggttggttcagtagcaggtccaggtaggctagataaggacttgggattttttttaaaaaaaaggtttacagtcatttaggtcactgaatatcatttgggttctttgattttaaagttggctcattcaaggtttaggaacctctagggatgttaggagccaccaaagatcatttagaatatttttggctatttaggatcttttactattatttatgatttttgaaattcatttgggatgatttagggttattgttgttaaggatttggttttaaagtttttaggtttacagttggtaggaatgtggctggtcatgtagcatttgctgtcatttagacctttttattatatcttgacttcattaaggttatttaggacctttttcaattattacagcatttaaatttttttctagagtttatggtcactaaaagttatttagcttcttttagggtcctctgggatcatctagggttgattaatagcgtttaggaatcttagtgtcattttattgttgtcattttaattgtctatcacctttaaatgttttacaggggattgtgtttcattgttaaggattgtttagattcatttaggatcttttaaggttggtaaagtggtcctcaaattcagtgcatacaggagtcggagaggaggtttgtgtattagtccattttcacgctgctgatgaagacataaccgagactggacaatttacaaaagaaagaggtttaattggacttacagttccatgtagctggggaagcctcacaatcatggtggaaggcaaggtggagcaagccaagtcttacatggatggcagcaggcaaagagagcttgtgcaggggagctcctctttttaaaaccatcagatttcatgagacattcagtatcatgagaatagcttgggaaagacttgcccccatgattcaattacccgcccctccacaccaggtcactctcataacacgttaggattcaagatgagatttggggggggacacagccaaaccatatcagttagtaagaaagaggcaatattaaaaattctgctgccaatgccacagcccagaagaattgaaccacaatctcttggtatggaatatagacatcagtgttctaaaaaaactccccaggtgattgcagtgttccccttaggctcatttagaacagttagtgcaccagaaacatcagcatcacctgagaactttatattagagatgcagattctctgccctactccatctgctgaatcaggaactctggggttggggcccagcagtctgcgttttcacaggaaccctgggtgattctgatgcttcttagaggtcaaccccactagcatgacgtttacagggatcttcaggatccttgaggttttttagggtgggggaattctaagggcattttaagaaccttagagtcatttgggttattttagggttgtttattgtcaacttagtgtgtgtatcctgagaaggtaccagtaggcacctgagtgaactatttttaaattcagtttatttgatagtcatctgagtcagcccagaaatcatgctcactgccagtgtcctggcctctatgggaacgaaaggcagagcagctcctgagctcctggctcaggcctcaggcgcatggggtgggcggggtgggctgggggagcaggagtgtcccatgtgcccaggcgggacaaggcacacatttatccagaagacaccaagcaaagggcttggtttgtgaatcaggcactgcatctggtacccaattcctaatcaagagaacttcagaatataagaaactgaaagtagaactgtctaacagcacattctggctaacttcaggtttccaggatttatggtgtgtatttttctctccttttgaaaacttttgcatgtccagtttctgaaaggagaattgagagtacagattgaaaatgtgtttggtgtccagggtgactgactctaaacacagggaatttcccaattcctcacatgaggtctctaacctcaggctcccgcgtactcgagatggcatggcatggtgactggtttcctcaaaggccttggaactattgacgccatccttccattttgcctgtgtattacatatgtgtgtatttacattacatatatatatgatttttggtatatgggactgcatttccattgcataatgggcctcttattcttctaggaattctgaagtctagtgcttagaaaaactgaccctaccagggacacaaaggcctgactggctttaatcttctggccattgttgttttgttgttgttgttttgttttgttttgtatgtgtttatacgtttttggattctcaatatttttggagttactaagcaggaaattttaattttaaagccagtgtaatagaagcagtaagaaaatctaatagcaccaccccaacataacttttttcataagcctttacatgtaggcctgcaatcatattgaacatactattttatttactttacataacaatattttccatgtttctacataaactattatgtaatttcattctgagtctcactctgtcgcccaggctggagtgcagtggcacaatcttggctcactgcagcctccacctcccagttcaagtgattctcccgcttcagcctcttgagtagctgggattacaggcgcccaccaccacgcctggctaatttttgtatttttggtagagacagggtttcgccaagtcggccaggctggtctcaaactcctgacctcaggtgatctgcccgactcggcctcccaaagtgctaggattacaggtgtgagccaccacgcccagccttctacataaacttgataattacacttccagtagcagaataatattcatgcttacggtttttattttacctataccattatcacaaagaaggaggaaagcaaggaaaaaaatgtacttggctttttattgggattacttgaatgtttagataatttgggggagatctgttaaattttcaatccgtaaatgaggtatatcttcccattttttaattttattttttaatcttttattagattatacacctagaaatacatagaaatacatttttatgtatcttccttgttttagcaaccttgcaaaattcattttatatttctaataatttatctctagattattatgaccaacttgaattcaacttttatttgttggtttcttttagtgggtcatagatgtcatagttcgcttttttgcttagtgatttttgtgacaacttgtgttatagttaatatttggctaaggaactttaacgattgaagttgaacactacattacgaaacgggaacggttcccttttccctctcgcagggcgtgagatagggactgtggctcgcttcttcagtgccctgcggctcaaacctctgagggaccatacagacgggcaggctgtggggctccgaccccacaccagtgtccagagggtgaatgtttgcagctcctaagccccagcgggcatgtgttacagggtgctcttttagtttcgccgtccataagccgcttgtgttaagcagctcaattagaccctctaccttgtcgcaaggacagagggctttctgtatcccggtgttcttgccttgtgtaccggaaaaatcgcatcacgggtgagcttggagaatgagtgcaaggctttattgagtggaagtagctttcagcagatggggggaggggtgccagaagggagatgattttcacctggagtcaggccactcgaccccacgggctctcctccaactgccccagccaaactccatgcccttctgccagttcatggcctgccagcgtgccagtgcccgccgatgtgctcctccccacgtccagcccccaagtgttcctccgctgacgtgctcctctcgactttcagccgcttctgtccctgccttgctagggtctcgggtttttataggcataggatgggagcatgagaggccagggtggtcttgggaaatgcaacatttggacagcaaagcaaaaatgcctgtcctcacctaggtccgtgggggtagagccctagctagggaccacgccctcctctacccagcacttcacttccccacttctgtatcatttaaagggaccatgctcttcccttcccagcacgtctgtatcaattaagatctttccttgggatcattttggaatcaaggctctttgtagtcccagacattcaatatccacaatgtgtgggagttctaagtagtttgttcccaaaattataccctagacatctctgagacataattactttccatcagcaagacatacccatgctgtcatgttccatctgtcccagtgtttggcaccaactaccttctcagaacccctgggttgtcccagggaaggatgttgtaagataccccactctcggtgctgttgaccccatagatggctctgcaggtgagggtaggtggcatcaagggcagcttagaggggcttagtgactagcaggggacattcaaagtcatgaattattgagttgtggaaattccttatgtattttgaacgttaaccccttatcagatacatggtttgcaaatattttcttccattctacaggttgtcttttcatttcattgtttcctttgctgtgcagaagctttttagtttgatgtagtcccacttgtttatttttgcccttttttttctttgagatagtgtatctctctgtcacgcagactggagtgcatgtgattttggcccaccgcaaccgcagccttctgggctcaagcgatcctcctacctcagcctcccgagtaaccgggactacaggtgcatgccaccatgcccagctaattttggggggtatattttgtagagatggggttttgccgtgttgcccaggatggtctcaaactcctgtgctcgagcaatccacccaccttaccctttcaaaatgctaggattacaggcatgagccatcacacctggcctgtttttgcttttgttgcctgtgctttttgtgtcatatcctaaaaatcagagaacaaatgttcagtaacaaggtaagttctagggatctaatatacagtgctgtgactatagttaatagtactgtattgtttacttgtaattcactaagaaagtagatctttgacattttgggctggatgaagaaaaaaacagtagatctgaagtgtcctgacatcacacacacatacacacacacacacacacacacacaatggcaactgtgtgatgatggacgtgttaatgtgatgtggtaatcgtttcacaatgtatatgcgaaatgtgtatgtacaacaatcatcaggttgtacaccttgaatatatgtcatttttatttgccagttatgccacaataaaactgaaaaataaatactttttaaattaaaaaataataatattcatgtttatggcttatgaattagtaagtccaagcttaaaactccaattagaaaaatgtatcttgctctaatgcaagaacaattaaatcggggttaataaaacactgatacacaaaaatccatattatattctgcattatgtcaaaacacatgtttagatttcagtttttcctaaagtttaaacttaacacttaaattccaacttatggctgctgcttaaaaacttctcatcaaaattatgataagctgctctttggccaactcatagggtgatcatatttatcatccatactggatcattttgagagtaaaaggggatgctgttaataattacatataaccacagaataaagtggaagtgtcccaagcaatccaggacttatggtctctgccagtgggcctacctaccattttaaaacttctaaagttaacttatacacttataaagcatatacttataatttatcacttatataaagttaacttacttatataacatatactgaaactgtaagtcacaatttcttttttgcattatttcttcttttcttctttctgcccccatatgatccgcagaaaattttgcatggttttaaactaaaaatagcaatgttaattttactcaagttcagttttcagcagtgttttcttgcatttaaacatttcagcaacctattcaaatgtcttcaaaacttgacagtgaagtcttgtactcacagcaaactccattcagtcatagcctcattacctaaaatagataataccaaattacttcataaaatctgtttctataaaacaagccaagaactgccagcacctttggcagaaggctattagaattttttggttattttaggcactgtaactcctacaaggcttactgcattttggggggtcgtggttggactccagatgaaccatttatcttcagtgtatatcacctgcatctacatgatgcactgtacaaaagtctcactaccttggaagggttaactgctcatctgtttcacccaacttaaaagcggcaactgaaaagctctctttgaattaaaaactctaaatatgggaaatcgaaacaacactccaagggaactgtgatttatccacactttctttctgtctctctctccctccttccccatctctctctctctttcatacttatatatgcattgtttacagaagcatcattaaaaatctggtcttggttgttaccttcttctagaggccaaattataatggtcactatttctgctccatggccaggtttcttaggaagacaaccgtcaaatctcatattaaactttatgaacaaatgaaattatttctgtgtattagtcagggttctccaaagattgtgcgtgtgtgtgtgtgtgtgtgtgtgtgtgtgtgtgtgtgtgtgtagagagagagagagaggtgtgggtgtggggagacagagcttaaggaattggttcacataattgatcctgtagttcaagtccaaaggcagtcttgaggcagaattccttcttctctgggatctcagtcttcgttcttaaggccttcaactgattgggtgaggcccacccacattatggagggcagactgctcaaagtccactgatttaaatgttaatctcaacttaaaaaaaaaaaaaacaaattcatagtaacatctagtgtttgaccaaatatctgggctgtatggcctagccaagttgacatataaaattagatatcataccttccccgtaccatagggtggaacttgggccctagtctgaaaatctcacacttggggagccatggggggatgcttccaacagaagcaagcccaggtgcccaacccctgcaggggggcttagccattttacaggtgagaaaaccaagtcctagagaaaggatcattgagttggtcccagggtccaagaggaaggggtggagtgagagtggaaatccagcctcactgaatagaagttccaagctctttcctccacaactcctggctctccagagccctcaactggcagctcctaagacaaccttctcattttacttcctatttgggacgtaacagccaggcccaaacatgttcaaaccataaacttggggaagaaaattaacttatctggtgggtgctccttcctgttcctgtcacccaccttacaaccaccctctcacaacacagagctcccgcagccagcagtcacacacagacccatccacggggcacatctctttgaaaagtgctttatttcagtaagatctaagtcagatgcattaaaacatatcaaaatgttacaaaaatgtatggctcccttgctgaggccctgtcagattatgttagatgagtaaacgcatcagtgtgtaagttcagaaccaaacgttgaatcaagtcatgtaccatcgctgaaaggcaagttataattaagaatacttcacaaggctaaaacaattgggaaaacccttcagaaacgctagcaattacacaccagaaacatcagcctggaaacaggtctgcgatctgcagggaagactccaaaggtaaactgagggtttcccaccacagcttgtgcatcttgtgctcagttaaatacagttaaaacacaaggggcgcttcaacaccccccttgtgatagggcagagctttctattacatctggaagaagggggcgccacattcattcttatttttacatctctaggaaatcatatctcatctcatctgagcgaagcaagactttgtgcaaaacgatttaagtggaaacgtgaaaatgtgtgctgctatatcagggacgcttatggtgatctcctgtctcctatctcattcttcacgtcatggtttggccgctgtaagacactgaaattgccttgttcatgtagaaatttctcttttggctgggcacagtggctcacgcctgtaatcccaacactttgggaggcctaggcgggtggatcacgaggtcaggagttcaagaccagcctggccaagatggtgaaaccccacctctactaaaaccacacaaaaaaattagccgggcgtggtggcgggtccctgtaattccagctacttgggaggctgagacaggagaatcacttgaaccccagaggcggatgttgcagtgagctgagatcccaccactgcactccagcctgggaaacagaaccagactctgtctcaaaaaaaaaaaaaagaaagaaagaaacctctctcggcgatgtatctgtgacaccacattctctgtgctacagagctttgacataaaacatggtttttggttgttttgttgttggtggtggtttctttaaagagaattcccttttcttaagagagcttcttgctcttctgtggccaatttcttcactctcctgacactttgaagtaaccactcaactccacagacttcttgttgagacttttttgcatggaaaacagatattttggggggggcattatatgctaccgatattaggataaaatgtgtttacctagaggtttctaggagagagtactgttctcttctggtgagggaagagaggattgtgaaaatatttctccttgaagcatcagcatgtctcagatcaaaatcttgacccgaggcctcagcatttttcttgcagatgggtgactaatatccagaaatcctcttgcctcaactcaactccaagttgaagtccatccagccttgtgcacgttcttcaccaatacgtacagggaagactatcttttgtgcttttcagcctctccccaagataatccccaccccctgccatttaagtcatcaccttccctctcatgtgatcacagagaatgtgaccttgtgcttaattccaccatcccagccagataggctcaggtttttccttcacttgatcaccttgtaacataagcccctcccggggtgggggtggtggggagacagatgcagctaaactgcttttcacaagttggaaaaaaaacccaaccctataaactggtcttttgtcctttacacaatttcaggttcattgcacgcaattacataaactcccacaaatcggtcgaagagttcaaaactgcaagaccatgtgataccagtgagaaaatctgctccacactgtggcaaagtgtctctgtttcaactgctgctatttcaaagaacccttccaaaatttctgatcaggttcttaggacgtgagaaatgacctctcaagagggcaggacaaaatggaaaagtgtggtctgcattacgtggaagtgtgttgtgtgagatgggatctcctctcacttccacctcctgacctcccatctttaaaaagctgagtctgccttagtatcgctcccttggaaagtgatctggccaactggacatgttgcagtatttccccatctaacactatcgtagtgctagtgcaaatcaaagagaactcttataagccagaaatcgctgtccagtaagagctagtggttagtagtttgctttgtggaaattcttctcccaagtcctccaaggagaattactggggccaactaaggccctgaacattcaaaataaaaattaccagaagagaagttctccaaatcattttctcaattgcaaaactcaggaggtgtttgcattcacagaactgttctttcccagctgtaacaaaggaagcctctcccggtggctactctttgtcttcttaccccagttctgtgcagcttgcagaagcccttctgggcttccactccatgccccacagggctggtgctgctgtccctatggaggaaggagacttgctataaaacccttggcgaaatgccaggggccgcatgccatctttctgcagtctacgttaagaccacagctgtgagccttctcaagaagccataggtatgaatcgggggcaggagggtgcccagggcagaaacgtctccaccaaaaaagtccaccttcctttggaggcaccaaccaggggctgtcctttcctcaactgcccagctctgcaaacattctgtggagagaaggtggagaagagatgggcagtgcctctaccccagctaggctcaaagacgcctgctatcaggagctcctgatcttgcttggtcaatctccatagccaggcacccaggtccaagcatctgtctccctcctcaaacgatatcagctgcactgatgcccagctgcctgtcaagcttcctgataggagtcccagggcacagactgttcttgcccttttctcccattggggttggatttaaagatcacataggtggctgctcagaggagctgaggagaagctccatcctccccatgcaccttcaccaggtggcctaaagagcttccctgaaccccacactcagtagcaagatgaggcttcattcttggaatgcatctccacacacaaggtgagggcaacttgcaagaacccagaggttggaaagaatggtcttgactgcaaacatcgccccagcttcaagtgcaggaagacctttgatgacatgaagatgggctgcgttcaaggcacctgtcatatctgcaggtagcctcgacatttcccttcaacctgaaacttcctggccaccaggccaccaggccctggccacactagctggtcagcactgtgtacgcaccagcgagatctttgtttcttgagacatttccttccactcaaggaagcgccatagagacaggctgtcagctgggtacagagaaacacacaggatcttctctgtctcctaaaggtagccatggaggcagagatggaggcagaatccactcttcacaggtttccacatagaacatcacatatgtctttgtcatttaaaacaatcaacgtttccagtgtaaaaatacgtgggcttattgcatctaccccacggatggtttatctttttctttccatcagacttgccgcaaggttatgtggctgttattttgttaatttccaaggctcttacattcactgatccttctaggcatacagggagaatttctaccaacatataaacaacccaaatggtgaacctggagaaccctcttccctctctaaacacagacagacgtgtggctgctccctggcacttgagaggagaaatctttccttcaacctaaataccactcagatcagtggctcctctgattttcctgctcacgagcagcacatgtgccaagctcacggctcttgtgctggttgcctggaatttaattacatgtgaaagtatcaggtaggcacatggacacgtaccatgtgtgcacacacatgtacacacacacattttgggtcctccttataactaaaatcaaaagtccttgtgagcagaaaaaaggagggcaggggtccagggatagggagctgtctgctgacttctacatccagctccaggtagcaaatgatggcttggccggagctggggaggtttgtgtctaaatgtttccatggaaagaaagtgcctagcttcctgggggtcttatgggcaatggcggttcctggggtgcccagatcccctcgttctcatggctcagattgttgctggggtctcggctatctcctccagcctctgtcgaatcattagccggagcacggtgtacctggagacaagaaacaggctcagatggagagcagccagcaacacacccctgcccaggaccttcccggccacctgggtaacaccaaggtcacaccaggtaacagtgcagtcaagtgccctgctcctttgcttccattactgacccctctttagctactttgttgcttatgttcattcctacaacacgatgagaggaaataaagaggccaaatccaaattagattattttactatgggtagaacatctagccaaaaaaaaaaaaaaaaaaaaaaaggtaaaaaaaaacaacagcaataataagcattctacgaattcagtgcgtttgcttactatgtccaagacactatgcatagtacttcatatgcacagcagctcatgaaccctcacctaggctagatgatataaaattgctaacagttgaccctcttggggatcctacaaaaatggcaacttcgtatggttcaaccttataacagaacctgcattttgcagaagaggccatagcagctactaggcgtggaggtccgtggcttggggggagttctgttttcccacgacttccctgagccgtggcactgcagctgcaggagtgggcactgttgtgcagggatcaatggacatattccttatgttcagggatttgtgctgcacagaaaaagctatttttaaagtttaggacatagttggctgggcatggtggctcacgcctgcaatcccagcactctgagaggccgaggagggtggatcacttgaggtcaggagttcaagaccagcctggccaacatggcaaaaccccgtctctactaaaaatacaaaaaaaaaaaaaaaaaaagaaagaaagaaaaaaatagctagatatggtggcgcatgcctgtaatcccagctactggggaggctgagacgggagaatcacttgagtctgggaggtagaagttgcagtgagccgagatcgcatctctgcactccagcctgagcaacagagcaagactctgtgtcaaaacaaaacaaaacaacaacaacaacaacaaaaactttaggacatagtaagtgttcagtgtgttatcagactagttatgatcatcgatacagcaaatccagcagcggctttattctccagtggcaaaaatgaatcattaattccaccatatctatgaaaggcagtctcttctatgactaaacatagcaaagaaatcacaaaatccttcccagaaagccgctttatttttcaatccaaatgcaatttccagaagataaatgttacaaagggaggaagggggagaggagaggattttggaggccagtagctcaggctacatccacggctaagacagccttcctgaaatccctggaacctccgggtcttggttagcactccttgccttcaccccttcaggcaaggggtggtaacactagccccagggactgcactatcccttgaggttaccccagactctgcccaagtcttcgcaaatagtcccttcttcaaacacccgtcaaagaccctcatcggagtgagcatctgtctcctgctgggagcctgatcgtatacttaagaaaccagcgtacagtcaccttccctatttctgcatctagaccccaaagaaattttaaaccaacaccttcttttcagagtctttccataagagggaggacaagagacactttgatgtcccacatcaaaacgagaagctgacacaagaagtagatgaacacacttaactgtcacgtcctcacttgaaatccaggtttgtcaatgggcagccctccaaagaaagccgagactcaggcccatgcagcagctcagcacagtccctgcgaggacccagcagaggcccctctgttgaggccccaggagaagtgcacccagtgccccagaagccacacttacttgcgcatcagcttctttacttcccgatcttcttcctcctggagcttctgaatgaagcttttaagtaccggcatctcgaactttatatactgggccacctagagagaaagaagcaagtctgggtgaatgcccttcccagcattattccaattcctttcagggttgtccttatacaaggcacaaagccttgggaagtctatttttttcagaaacccaggatttccttaaaggcagcagccaagcctcattcctcaccagggtgggaaggagtctgcgatgatcgcttcgcttacgtgacaccatctcataacttctcatttttcatgtcatgcattcaattcatgatgaggtgaagccaaacacagaaaagtactttcttttgacacagtgatgcagagaaagaactgaacccattatgtttaataaacccctttgttctcccctaagagaatggaaggaatcagggttccagatgacgatttgggtctcaaggctcaaacaagcatccaaatatgaactcgctttggagaggctgtgggtggctatggggtgagttaaagtttaaaaacggtgccaggcatcgtggttcatgcctgtaatcccggcactttgggaggctgaggcgggcggatcacttgaggtcaagagttcaagaccagctggccaacatggtgaaaccccgtctctactaaaaatacaaaaattagccaggcatggtggtgcacacctgtggtcccagctacgcaggggtctgaggcaggaaaatagcttgaaccagggaggtgccactgcactccagcctgggcaacagagcgagactccatcccaaaaaaaaaaaaaaagttaaaaaatggcttccctttccccacaagaatccccaccctgctctatcaactcttctccctgggataagtacatttctctaccctattaatgctgagcttgtccatgtgactggctttggccagtggaatgtgtgtggacatgacacaccaaatctgagtggaggcttcaaatatgcttacatgatttggcctggtttctcatgctccgccatctgccatgaggaccacacccatgtgcagtaactactgccccaaaagcctgggcctctgggtgagtcacacagtgcagacttgaactcaacccatacttagagtagagccattgctactagaccacagaatcatgggcaaaaaagcaaatgtttgctgttgtcagctactatgatttggagatgtttgttactctgcaaaagctggcttcgagagaacctggtgctgaagaagtaaaagggggcatggtcgttggtcaaaaaagtcattctataccccagttacaggtggtccaaccaaatccccaccctcctgaggacagatcgcctgacccaaagggaactcacgtcgtaggtgacttcctccacctggtccttctccattaggaacactttggagatctgctcacatgggccctggaggattcgggcaatcagcgggtaatcggtggccttcagcttctgtttctctgcaaccacacacacccaggagcagccctgagaggcctttctcacattaagtagtggttaatgcaggggtccaaaggcaccttaggagatgccgccatatacgtcaggagactgatttataagtgaactattccataggtgttgtgaaaagcaacttcctcccactcctcacccctcaacaataccaccatgcctcaaactccttggaggaattgggtttatctgtctcttaagaaaatctagttcctcttttaataggcagttaggtttagaatttgtttactggccatataaggcaatccctagtagactcatacagcaagcccatcagccttgaaggcaaacaacatttggaagtttccaaaactcaaacaacaagcaaaggaggcagaggtatttttttaacttgctattttgagttaattagaagttttaaagtacactgtggtcttcagacttaccaccactcgtatggaccacgtacaaggcaaactcctctgctgaattctcaatctgaagcaggagcaaaagattcttgttgaaagtttctatttaaacatcccaacttcgaggcttttcctcttctttagcaatgcaaagctaagtcaattttaggctgttttgaggggagagctatttatctacaactctcagaagtgatgagaagatcgagaaggcagatgactttatcaataatacagtcatgcacttaaccacgaggatgcattctgagaaatgtgtcactaggcaatttcattgttgtgcaaacatcatagagtgtgcttacagaaacctggatggcatagcctacttcacacctaggccatatggtatatagcctattgctcctagtgtacaaacctatacagcatgttactgtactcaatgccgtaagcacttgtaacacaatggtaagcatttgtgtatctaaacatatctaaacacagaaaaggtaccataaaaaatggattataatcttacgggaccactgtcgtatatgtggtgcatcattgaccaaattggtcattctgtagcacacgactaggatagataacagctatcgtctattgcaatgtgccaggcatagttctacaaatgttaaaggcttcaacccatctaatgctcacgacgataccatagtgaagtcccattatcctcattttatgatgacgaagcagaggcaggggcaggttaagtaacctgcccaattcatccaactagcaggtgctcagtggagatttgaacccagagcctgtgttcttaggttgttaggctacactggcttccattaaaaataagaacacctggtctccaaaagatctctggtctccaagagattgtggaaaacacagagcaacagaactttaaaagcactcctgcactataatttgcacgtctatttaagtatcatatttcaaagtaggtttcccaactgtgtcccagaagtcaatcttcgcactgagcccaaaaccagtcagcaggccccagggtccttctaaagtagcccataaaggatttgagggctgatgtttctcaaacttcggtaggcatccaaatcccctgcaggcttgttagacggcgtccctggcctacccctcacaatttctgatttagtgggtctggggtggggcctgagaatctgaatttctaacaagcacccaggtgatgctgatgctgattctgtggactttgtcctggatcgtgaggatctaaagaaccgaagccctctgctcagcatcccacaaaacacacaatttccatagctcctcgcacaaccactctaggagtcccaaggcacagctgtgaccccatctgtggccactcagcaaagggaacttgccttaaatttgttgagcagcagcttcaggacctgtggggtggtcatggtgctgttgatgcggacgttggtgacagagccataggctggtgtgaacacggatgtctgtcaatagaagggcccagctcagggtgggagtgggaacaaggacccagtgctaaaatccaggtgcggtacagggcacagtgacaacgatactcagaatgtactccctgggagcccccggcagactggcaagcagcaggctttgtagacaaagcaaccctcggggtttgcataattcagttcatgctccacgctcaaaaagacccttcctctgggacttcagcacaaggctgtctctgaccactctcccaccatgtattgcctccgggggtaggatttgaacaaagcaggaggaaaggagggatcagcaagatggggtggggtgggtggtgcactgacaccccaggtctgagacctgcagctctgcttcagctctgggaaaagccagaccatacaccagctgggggcacagtgtgcaggaagagggtaacacgtggattttcttgggagagactgatgagctgcgtttatggggtcttcaaggctacagcagggactgctttgtacagccccactgaattcacccaccaccttaaggggaacccacagggggactttgaggcttctgacctggggtccctcagccctcaggaagccagcagggcttgcagcccacccacaacccaaagactaaacagcagcaaacacttggcttcccaggcatccacaccacccaccatatggctgtagccctgaggtggcatctacccaggaagaggtcttccaccctccccgtccccctgtccaccttaccttatggttgtagaaatggccgttgatggagaagcggtggcgtctgattcgccgctggtcactaggcgtcctcacattgccacggcgacgcaccccaacatcactgcgtgtgcgcatcagctgtggggtgtcctcctgcaggggcttcaggcccctggagtctgagagaggagagggaaatgaactctgtctgtctggacctgggacatggcacatggtccccaatttgtggccagtgcgacagcacccactgtctccacaaatatatattttatacaaataatattttctgctgggggaaaaacataatgcagaatttacagagaacctatacaaggaaaagttcagagaacagacttcagagccggactccctgggttcaaatccctgctccatgattgccatatatcactaacctctctgtgcctcggtgcttttatatataaaatagggataataataacacccacctcagagggttgctgagggtttaaatgagttagtatacataaagcacttagaatagtgcctggcacaggataagcatgatataagagctaacaagatactgcaaacaaactctgacacatgctacccacggatgaaccttgatgacattatgctaagtgcaacaagccaattacaaaacagcaaatactgaatgattccacttatatgagatacttagagtgtacctcatataagtgtaccacatataattgaggtacactgtaagtacattctaggtacatacaaaattacagagacagagagtagaatggtggttgccaggagctaaagagagaaggatgtggggagctattgggagtttaatgggtacagagtttcagtttcacaagatggaaagagttctggagatggatggtggtgatggttgcgcaacattatgagtgcttttaataccactgaactgtaccacttaacatggttaagatggtaaacgttatgttatgtatatcttaccacaataaaaaattagaaaaaataatgtttaacagaacatgtatctaaaaatatgtggggttcccatggcatatgtctatccttgtatgtgtataaatatacaatactgacattaatcacaagtaggttaatctgctcttattaaaatatatttaatccacgtaatataaaaaagattttgcaaactgacaatatctatgaaaattaaaaatgcatatggccttaaacccagaaagtccacttgaaagaatcctacacgctgacaaatgtgtgacgtgacacatgtataaggccgccgactgcaaactcgtttgtcatagcagaggctgaaaatgacttaaatgtctaccagtagggagtgattacataaattatcctttttccatacagtgaaagaatgcagagctgtaaagaataaggaagttctttacaaatgtatatggaaacattcccccagataaactgataaataaaaactgggatctgcacaatgctaccacttgtataactaggggaagaaaagaaactacatccaaccaggcgcggtggctcatgcctataatcccagcattttgggaggctgaggcgggcagatcacttgaagccaggagttcaagaccagcctggccaacatggcaaaaacccatcagcactagaaatacaaaaattagctgggcatggtggcccatgcctttaatcccagctactcaggaggcagaggtgggaggatcacttgaacccaggaagcagagccaagattgcactactgcactgcatcctcctgagtgacagagggagatgggaagggaagggaaggggagaggaggggaggggaggggaggggaggggagggggaaagaaactacatccacccataaagacatgtcagtgtgttttgcttatatttgcatggactatcccacgaaggatgttctcgggatgcttctaggtgggtggatgaggtgggtgacttaattctctccctttgtatcttgaaccatatacattttatattctcaaaaataaataacagtttacaacatctatcacagcggtcttcacacagttggtccctagctggaagtaccttccactcacatgtacctgtggagcttggcatctggtcaccctccggcggggcatccacctctgagatctgaactttgggcacagtcaggggcttcagagtggttctgggagtggagaagacaaaggggaggggggagactagtttaagccctgtggagagacgcccccgcacccgctggaccccactcctgaaaggggagcactttgctagtgccaggctgggtactggcacacatcaggtgatgaagggtgcagatgggctgcgcggagcatcccgtgaaaggctggcccagctcccaggtcaagcagtgggtggggcagggggagttccggagggagaagatgttcttttgcagcaactgcagtaacacacccaaccaattcatcaagcccaggatggataataccaaggaacaaaacccacgtgttgcctgcactgcttctaagcatgtatggattctatggcttacttggaaaactctaatagtggccattcgttttgcagggtaagattccagtttagactcattgctgttgaagaaataactcataattgcttctggcattcaaaaggaatggaaagtaataagttggccacaacaagggcaggggcagctttggaagggacactgacagtgttctcagcgttgcaaggatggagtcctcatccaagctgaagaaagggttacaagcaggcagtccaagctgagaccctggtttgccatcataactggcaaataacttctcaaagccaaaaaggacaaagggagcagctcagaaaaacatccaaaatcaacagaggatttggctagaaaggagaatcatatttgaccaattaggaacaacccatggtgagaagagcatgggctccctgggacccagtagagataaacctcatgttctggggaggatcgttttaaggaaggacaattaaaatggaaaatctgaaagaacttcctattgtaatttaactcatatacttctgaaccacagaatggacctggtcagagcttctggggaatggtgaacacttggcacccagagcagcgactcccactccctgatttaaagccttcattcttgctgaagcaggaaccggtctcagcatccttattttttttttttattttatttttttgtagagacagggtttcaccatgttgcccaggctggtcttgaattcctgagctcaagtgatcacccgcctcagcctcccgaagtgctgggattataggcacgatccaccacgcacagcctcaggatccttcttaagacagcagtctaggcattcactgtattatagctgacatctaaatgacaccatttaccattcctgaaaattctaccaaagtattttgcagagtcagccaggaccagcttgatgccgcagagaagggagaagaagcaggcggaccgaaggaccctttagcagcccaaaccaaaggccacaggctcaaacgaaatcttaaaaatcatctcacttagggaatagaatagtctgggggtcagggtcaggctgtgaaatgggcttggccattggcagtcaaatacagcaataatacagtatagtataacaaatacagtatagtataacaaatacagtacagtgtaacaagtacagctgggcatggtggctcacacctgtaatcccagcacgttgggaagtcaaggtgggaggattgcctgaggccaggagtttgagaccaacctgtgcaacatagtgagaccccatttctacaaaaaacatgaaaattatccaggtagggccagtatggtggctcacccctgtggtcccggaactttgggaggtcaaggaaggtggatatcttgaggtcatgagttcaagaccagcctggccaacatgatgaaaccccctctctaccaaaaaatacaaaaatggctgggtttggtggtgggcacctgtaatcccagctactcaggaggctgaggcacgaatcgcttgaacccgagaggcagaggttgcagtgagccgagatcgcatcactgcactccagcctgggcaacagaaaaaaaaaaggtcggggtggggcggtgtgcacctatagtcccagctgctggggagtctgagttgggaggatcacttgagcctaggaggttgaggctgcagtaagctgtgattaagccaccgcactccagcctgggaaacagagtgagaccttgtctcaaacaaaacaaaacaaaaatatggtgatagtgctgaaaagcagagcatgaaacctgcaaagttagatgaaaccaaagaaccttaaccagacatcctagcacctatggggtgggcaacaattttcctccttaaatccccttggaaagaaaccagaccagccccagggctggccacatagtaggtttctctcaattgtagagaaacatagatttggctgtggagtttagcaaaatgttcaatgtggccaacagagagggcttggttttcatttaaaccagaaaaaaaggtcactgtggttttggctgagaggcgagcacactccacccaggctggggccgaaggcagtcagcatcagcaggtttcaggatggagacaggctagtcacttgatcctaaaactcaagtcccagaaagacaataaagagggcatgccttgctagaggcatttggcggcgcatttggcggcttattcagccatggaggataaggagggatggactaggtcttcccagcccttctggtgggaacttagactaccaccatctcaccaaaccctggctccccgtatggtctgcagggagcagacccctggctgatctcgcttggctgactctgacagagcctgacattccttttcctcttctaggttcccccaagattcagagagctttggtcagaaggttcaagtcataaatgctttggagtggggctattctatgaggagtggtcccagtggggagggtgctggggcatggggcgccctgttagaaatatacaggctgggcctcactagccactagcagctccactcagagactcctgagttctccctaagggaggactctgactcagcagctcccctcgtatgactcagcagctcccctcctgtgacctcatcagtgattgcagtgacaggaagggggctcaatcacaaccacatctgctgcttgttcctcattccaaggctaaggcaggtgggcagtagaggtagtaggaggaggagccagggtcagggctggctggaagaaggcagcatttatctgcttgagaacacatagaacacccaagcatcccagtcatctccctgccccgtctctcctcactcacccctgagcccccaggttacagccagagtgccaggaggaggaggatggagggggtcgaatgcgttcgttgtcatcctgcatctgcaggcgaatgggccggcgcaggccccaggagatgttcaggagcccctccacaatgaactcgtcttcttcctgcccacaaagcaatcagagtagtgagcctagaaaagcccccacagaagccaagaccatgctgagggacaaatgacacattcttcacatgtcctggctgggggcccccagactgtattcacaggataggggcagctgcccagttcacaccgcagctctgagatactttctgacgtcaactactccagatcctgaagctgacctcacaggtcagcacaaaagttgctgtgaaattcaaatacataggtataaattataaaaagcattgtttttctttttatcctaatgacttttaaagaaagcggaatacatttcttaaaataagtgagattagccttgttaacagaagcaagaactggagttagctacgtcccatcccctactacggaaaatgatgtctctttagctacaacatctgtttagcaatccaacctggtggttgaaggaaatttaaagcaacatttgccgaagtttattctacagaacactagctcctctagcagatgaactgctgtctttaaaagggtgtcaagtgatcatgagctgggagaggctgtgctaatcagatttccaaacagcagaatgtcccaggttctgtaataaactaacgggctaaatgacaactctccaacaggtgaataaatcttgcaggagtccccaatttatactcaaaggttgctgactaattagacattaaatgtaaaaccattctagaggcatttatatgttctatcccgaagaattgggactcgcttatgactatgaaatcctttaatcatgaagcacttttaatcatttattctataggacataacccaggaaagctatttaagaactaaaatcttgcatggcccagctgctgattagtaaaagcttgaagggcagttcctaaaagaatcggttctcctccctctagtctcagaaaaacctttttggagccatgttttatgggctattcaagtgttagatctgggtcatggaacacatcttcaggacaagccccataggtgaaaataacatcagcccattgagcaactaactaacttgggccccaaaatcatcctcaaagagggaggaaggaataaaagagggaaggagagaaatgaaacaattttacggtgcttaggcgtctcagggaggaaggctttatgtaaacataggcaatttacatggccttcccctggtcaaggtgggcatcattcctttacacaattgtaggtcaaaatttaacccaaaacaggattttgtctaagtggagtggtttgagggacacagaataggccactacatcccacatactgtccccaagcaacctgccctagcagctgaaattccaccatctgttatctgtttctatggttaaatcgccacagcttgataacctgaaaatgtgtttcaaagggcattacacatagggacctttttatcagtcacaggcgcttgagtataaagtaccctaccagactcctttataactcatcatctatctgataacaggctttagagaaatggatacaggatgagtaagctcagtttcaggatgggaatcagatgagtaacaaaagcaacctaggatgaccaagtgtggggacgggcccactatcagtggggactctgctaacatccagagcttatgtgctttgcccaggtcactgcagtgataggacttgggcccaaatgtttaaacacagaggactgggtggggttcccgaattgcccaacgagagaacgtctgcttgggagccacctggaaaggtcatttcatgaaagctccctctggagaatctcccccatgagactgggctagccctgccacatttctacaggaatgtctctggaacacatctctgaaacattcatcctttttggaacaaaactgggcctggagtcttcttccaaagaaccccaaggactctcactagcaacctaaataagaagcaggagaggcagggttctcttgggacctcagggaccttcagacccaggacacatggtgacaagccctggactagccaatcagggccgtccctggggactccttacctcccggtgccggagctgtaaattctggccttcatagtacaagttgtaggtcttcagatgcaagagaagttcatttcttagggggaaaaatagaagagatataacattatcagctgaagccacttataatgcagttgttccctctttctctcacctctcacctggccttcagtcaccccactttgggtaactgtccacatgtacatacacacacatgcacatgcacacagagttctgccaccaccaccccataaccatcttcccccaggatcaaagtcaagagtgagcaccaccccagaacaatgcttaaagtaaggagcaactccaggacaccaaggcaggcctcgtctaccgacaatactcccaaactcaagctgaatgagcaggtgttaataagccatggattcactgaggcgagcacttcagagcccacacacagcgattctcctgcatggctgtggccttttctccctcaagcacgctgtgagtgaggaaaggacaataatgataggccttcacaagactcagaagctggctgcgcgcagtggctcatgcctgtaatcccagtactttgggaggccaagaccagcggatcacttaaggtcaggagtttgagaccagcctggccaacatggtgaaaccccatctctaacaaaaatacaaaaaattagccaggcgtggtggtgcacacctgtattcccagctactcaggaggctgaggcaggagaatcacccaaacctcagaggcagaggttgcagtgagctgagatcgcgccactgcactccagcctgggcaaaagactgagactccatctcaaaaaaacaaacaaacaaacaaaaaaaaaaaaacttgcaaactcccatcagcatcagaatgggtgcataaaggaagcaatagccacacaacggaaaattatcagcgaagagaatgtgaatgaactacacaactacacgcatgtgtgtgactcatgggaattataggatatgtgcttttcttgtgtctagcttctttcacaaaaaagcacagatcatattccattgacagaaagttcaaaatggagtgttagaattcaggatagtggttcaccttggggagtagtgacaagaagtgggcatgaggtggcttctgggccctggcaatactttttcagttctaaaaattaaaaaataaaaacccttagaaactccccctctgaagcccagcactggacctccttagccaccaagttttccaagtggctgcactgggagtacagctctactgcacgtggccagagaggagatttcaccccctttgtgatcagggaaatccctcatcaaccctgagaatgcacaagtcaagtttcatctgaaagtgcatgttttgcactccaggtgggatgagaggggcgagaggtggagggggccactgtgcgcttttgtctagtctcaagtaagaggtggcagagttcagcctctctgaacccagccattcagtggagagattttggaccacgccaggagtcaagacccactggaaatgccaagaaaatcctgacaagttaaacctagataaagcagcatgattctatgcaagctgaaataaatttgtggaaaatgtgattcgaaatcacctaagacaaaaggccgtttggtacttttgaacacacagatctgaaaccgggagagaaaatcattggttggtagaagtccctggggaaatctgtccacaaagagataagaatggtcagatgtcacaaaacatgtgtcaagtgtgcctaaggacttccaacaatttagtcccagataaattaaatatttcgttaagatagagaaatcccagctgggtgtggtggctcacgcctgtaatcccagcactttgggaggccaaggcgggtggatcacctgaggtcaggtgttcaagaccagcccgaccaacatggtgaaagcccacctctactaaaaattaaaaaattagctgggtgtggtggcgcatgcctgtaatcccagctacctgggaggttgaggcaggagaatcacttgaacccaggaggcagaggttgccatgaactgagatcacgccactgcactccagcctaggtgacagagggagagtccttctaaaaaaaaaaaaaagagatagagaaatcttatgctggaacttccaattcaagggtctattttggctcaagcccagtcacattagcaaaaagcctgagctcaagagactttagtgcacagaaagcaattaaattgtccccttctattcagagggcattagccagacccagagcagccgagggacacactactccagccaggactccctgggaacacaacggacaggacggggagcagtgtctgagtccattctggctgccggaccatagactgggtggcttctaaagaacagaaattcatttctcacagctctggtggccaggaagtccaacgtcagggtagagtcagtgtctggtgacagccctatcctcacagacagtgccttctcactgcgtcctcacaccgcggaggaaaaacaatctcccttggccttttataagggtacttagatctaatcacatcccagaggccccacctcttataccagcaccttggggtgaagtttccacataggaatttgggggagacacaaacattcagaagatagcgaacagccaccagccaactcctcctcctggaagtcttccaggataccacatcttttgagcccccaaagtttctgcgtcttgacttcccctttacttcacctccaggccaggctctcgggacatgtttttatctatagcagcagccctgacgctcttacaagtccaagttcagctgcttggctccttcccccatgcaggagccccaccagtctgatatacagtggggggccctctgccagcggctgccgtccacccacaacatcccagcacgggactggtcactgaggacaaaacactccagcaaaacgtcttacttggaaatgtatttatcttgtccacatgggactagggacgtttggtggctgtagtccattcttcctttctcttttcatcggaaggagaggcctacatttggaaggagaagacagaggttaaagtcaagttgtgtgcttgggaactcagcagaacttggggtggggagggggcacaaaattggacgccatggctctccgttcctccccacccagatccacagctaacactgacccaaggctgtgaggggcaacactgctggctgctgcctcggcttgccacagcctctgagaacaaacatccaaaggaaagacgacaacccttggacaatccaagcacaaatgccccagccacagagcacactgacagccacattggttccaaggatgactgatgagtcctcctctctgaagagaccgtcacaacacagaatagagagttatctcagggacagcccgattctactgaggtctactgaggatgggtaaaccacctgaaaatgcccaaatacagccgagtgcgagaaatcacagtatgtgtctacagacaccactaaaatattacaatgtgaaagacaatttaattataacaatacattacaaaaacacaggtaacaaaactatgggtctaattttgtttaaaatctatgtaagtataaaatatgcatatacatacacacatttacatgtataaatatttattcagataggtatatatatacatatatatatcaggatttctcaaccttggcactattaccatttgttttgttttgttttgttttttgagaaagagtctcactctcttcgcccaggctggagtgcagtggtatgacctcagctcactgcaacctccctctcccaggttcaggtgattctcttgcctcagcttcccaagtagctggaactacaggtgcccgccatcacgccaggctaattttttgtatttttagtagaggaagggtttcaccatgttggccaggctggtctcaaactcctgacctcaggtgatccgcccgcctcagcctcccaaagtgctgggattacaggcgtgagccaccgcgcccagcagcactattaccattggagctggcccattcttttttaatttctatttggagagaagcgatgtcactttgtcacctgggctgggagtgcagtggcatgaccatagctcactgcagcctcaaatccctgggctccctcgatccccccgcctcagcctcccgagtagctggaactacaggtgtgccccaccgcccctggccttggactgttctttgtcgtgggactgtcttgtgcattgcaggtgtttagcagcatctctggattctgctcactagatgccagcagcactaccccagtgatgatgaccaaaactgtcgacagacactactaagtgtccccaggggcaaaatcacattactcacaacagcccaaaggtggaagcagcccaagtgtccactgaaggatgagcagataaacaaaatggaatatacgcatccagtggaatattattcagccttaaaaaggaaggaaaggctggcacatgctagaacatgggtgaaccttgaagacattataacaggccacacccaaaaagaaaaataccatatgattccacttttatgaggtacctagagtagtcaaaatcagagactgattttatagaatggtgattcttcaaaaagtagaacggtggttgccagaggctgggaagaaggggaaatggagagtttcttaatgggtacagagtgtgcaaaaggaagagagttctggagatagacggcagtgatggttacacaacatgtgaagttacttaatgccactgaactagacactttaaaatggttaagatggtaaattttatgtgtattttaccactatatacatatacacgtgtatgtgtgtgtgtatatatatatatacatatatatatatatatattttttttttttgagacagagactcactctgttacccaggctggagtgcagtggcataatctcagctcactgcagcctcgactttcccaggctgaagtgatcctcccacctcagcctcccaagtagctgcgactaaaggcatatgccatgatgcccagctagttttttgcatttttagtagagatggggttttgccatgttgcccaggccggtcttgaactcctggactcaagcaacctgcttgcctcggcctcccaaagtgctgggattacaggcatgagccaccgcacccagcccacaatatattttttaagtggaagagggaggcataggaaccagtattacagtgagacaatgtgagaaggattcgacctcctggaagaaggatccacgacccgagggacacagacagcctctagaagctggaaaagcaagaaaatggacttgtcttagagtctccagaaaagaacacatccctgttgataccttgatgttagctcagtgagattcgtgtcagacctttgaactacagaactgtgagataatcaattagcgttggccaggcatggtggttcatgcccgtgactgcaatacttcatgaagccgaggcaggaggatcattcgaggccaggagttcgagaccagcctgggcaacagcaggagaccccatctctacaaaaaaaaatttaaaaattagctggatgtggtggcacgcacaggtagtcctagctacttgggagtctaaggtaggaggattgcttgagcccaggagctcagggctgcagtgagctatgatcataccactgcactctagcctgggcaacagagtaagacgttgtctcttaaaaaaataataaaataaggccaggcgcagtggctcacacctgtaatctcagcacttcaggaagccgaggagggaggatcgcttgagcccaggagttcaagaccagcctgggcaacatggggagatcccatctctacaaaaaataaaaaattagccagatgtgctagcatgcacctctggtcccagctactaggcaggctgaggcaggaggataaattgggcccgggaggccaaggctgcagtgagccacaatcacgccactgcactctagcctggtcgacagagtaagcccatctcaaaataaattcattaaattaaataataaaataaaataaaaataaatgtactttaagccactaagttttggtaacttgttactgccggttaccatgggtgattccattcagaaaactcagaccctaccagtgtccccaaaagtgggaccctgagaacacaattggtctctctaaattttaaattttattattttttttacttttccaaaaaaggaagaataatctgatcatgaaaaccggagtacacatgtaacgcgcaaaaagaaaaaaaggaaagtcgagctagtgagaaagctttcttttttttttttttttttttgtcacccaggctggaatgcagtggtgcgatctcagctcactgcaacctctgcctcccaggttcaagcaattctcctgcctcagcctcctgagtagctgggattacaggtatgtgccaccacgctcagctaattttttgtatttttagtggagacggggtttcaccatgttggccaggctggtcttgaactcctgacctcaggtgatctgcccgcctcggcctcccagagtgctgcgtttatggcctgagccaccatgcctggccaaaacttttctttcttaagtgacaattacccgtaactagtcagtgtccctttttctaaaaagttgccccttctacacatgtataaatttacacattcaacaagcatttattgtgtctacaacgtgccaagcatcgtgcttcacgatggtggctcagcagtcaaggaaacaaggcacatggtgcaggaggagggggatgtgtgggggcagagggctctgtcaagggagggtgagtgctatggtagcaaacaggaaggacacctacggatgagggtggggtcctggggggctttctggaggaagagacctctaaactgagacctcagtgttggcaaagatgaggggcgagtaggtccaggcagaaagagcaggcaactcggagctgtgcgagatggggtggcacgagcagaaccccgacctggtgaggagtctggacttcatctggtgggcaatgctgggccatgtgagtgtggaggatgaagaatggccccagagacacctgggccccgacctggagcctgtgaaaattaccttatatggtaacagggactctgcagatgtgattaaatgaaggatcttgaaacgaagagactatcctggattatctggggggccctaaatgtaaccaccagtgtccttataagagggaggctctgccacagcagagagaaggcgacgtgacaactgcagcagagggagaaatctgaaaacgctgcactgtggacgaagatggaggaaggggccatgaaccttgaaggcagctcacaagctgggaaaggcaaggacacagatttgcctcagagcccctggtgcgagcagagccctaccaccaccttagttttggcccagagaaactgacttcaagacttctggactccagaatataagtattaaatttctgttgttttaaaccaccaagactatagtcatttttctcggcagcaagaggaaaacaaggggaattccgagggcagggatgtgatctgatgtacattttggaaaggtcacccacccaatgccttgctttgtggagaaataatccgggagaagagcatcccggggaccagttgagaggccggagcccgagttggagagacagactctagagagttcgaagaagaagaggaaagtcgtgatgtggaaagcacaccctttggggaaagggtgtgctgccggatgaaacgtggggtgacaggcagagtcctggtgacgcacaggctgctggcgaggaccgcaacgtaggcagaggtgccaccttcacagttgctgaagtgaggaccaggactgagtttcaggcagacccatggaaacttccagtgcagataaccagaagtacagcaggcctggggcccaggagagcaattcctggcacgtgaagtgaggggagaggatgaggtcatcgggaaagaacagaaggggtgaaggggacagggcctagagcagggttcccattaacccagttggtcagcatgggcagaggaaggagtccctggagaaagaggaaaaacaggagacatggtaccaaggaagcccaggaaacaaggggccttgagaaggaggccaaggccagcagagccaggagctggtggtcagagcccaaggaaggggaacccagagcagcctctgttaaaccacacaaaggtcatgggggaactcagccagagctgatcgcgcagcctggttggagtggaaatcaggtgaacggtgcctgctgtcggcagcccttctcactctccaacactggagtctttcctcagccagggaaatgttattctatctttctttgattatttcccctcttcctcccattcttggttcttttttttgagacggtgtctggttctgtcacccaggctggggtacagtggagccatcatagctcactgcagcctcaaactcctggcctcaagcgatcctcccgcctcagcctcccgaagggattaaaggcatgggctgccacacctagctaatttttttcttaatttttcttttatagagacagggtcttgttatgttaaccaagctggtcttttactcctggcctcaagtgattctctcacctcagcctcccaaagtgctgggattacagtgagccactgcagccggtccattcttggttcttctgcaatctcttctctctctagcactatgcatccatccaccccggcagctaccctccatttccttatttttctcagaattctccagctaatcttctaactcaccaattgaattttctccaggactctctctttcgttctttgcctccaacataacctatcatttggtaatttagttctgcatctgtcctgctcttaagacaattctttttaataccatgtcttcttaaatctactgagaataccagttagagaatttgattcttaaaactatctggttctacagaaaaaaatagccagagcaatgaaacaataaacatacagaaatagacccaaatatatctgggaacatggaatgtaagcagcagttctaaatagcaggggaaaggtagcttaattttttaaaatatcactagagaattcgctggcgtttggaagggggaagacagggaagtgaaatcgctagcttactccttccaccaaaagaaataactgaaccaaaaatttaaacattgaaaaataaaatgctgaagaaattgataccaacctgtgaaaattttaaacttctgttcagaaaaaaaaaaaaaaggaaactatacaaagtcaaaaaggcaaattgaaaactggggaaaaatatttacaaaacatatggtaaagggctaatgtccttaatacataaagagctttaataaatcagtaagaaaaaggttctatgctcattcataaaatgggcaaaggacacgcacagtagttcatggaaaactcaatacaagtaattaataaatccatgaaaaggtgttcaacttccctcatgaccctactttttacttaccagattgatacacatcagatagtctgatggccccgactgtgggaattttctagggctcagccactctctacctgttgggtgatctcaccaaggccatagctataactccgacctatggggtcatgttgccccatctttgtctatggcctgacttctccccaccttttttcttactttgacatttcttgggaaaaaagtgttaagaaaatatttgcatagcctaacccaaagttgaactgaaattacaggtaggtgattctaggacccaatccctcttttgccccactctgggcatctgcacctttcttcacaaactttccaaccaccttcacaaagcactgtctccctgcagccagctaaagatactaagctacattcacatccaccttaaggcaaacagcagcagcactaacagagggccggaaattcacagttaactctgatattccttaaacagagcattgttcctcacacaaggaaggtcagaggaagacggtttgtggaacaggaatgtggattcaattggattcaactggacacttcctccaggggtgcctgccattatctgtggccttggagacagggattcattcgttcagctggctggttgcaatgcttctgcctcccctgttattatccagaatttatggtgctctcctgggctccaaaatgcctttaagaaccatttacgatcatgacttcccacggggccttgggaatacagactaatggttgttatgtcttgtaggagggaaactgaggcaaggaggaaagaggggcttcccacatcagccagcatctaggcacagaactaaaacacctcatagtctaccacacagagaaaggagaagaggggcagaaaggggacaagaaagaaagggcaaattttacacaaatcttttttttttttttttttgagacagggtctcattctgtcacccaggctggaatggagtggcacgatcacaggtcactgcagccttgacctcttgggctcaagtgattctctcacctcagccttctgagtagctgggaccacaggtacacgccaccatacctggctaattttttattttttgtaaagatggagtctcactatgttgcccaggctggtttcaaactcctggcctcaagcaatcctcctgttttggcttccacaatgctgtgattacaggtgtgagctatctctcaaaaatcatttttaatatggagctgctctttggaagtctaaaacatatttaaatctactgaacttcctctatgaacatagttacttactccctctagaattctaaatcagtacttctttttagaaaaaacactttagaaaataaagcatatattgaatgtctactaaccacaaagcatgtctgccaaaatagctggagatgtgaatacagctgggcttgcctagttgagacatgagtctcccaggttcctgtcatgctggaaccctgttggggccaccaaccagtcaagttttccctctgacactggcttcatgctttggcagaatgttccaaattctcctcagctccattaaatgcctgggcaatgcattctgcttgtcagtggaattcagctggttacttggagacccattcatgacttcctgactgcctgaaagacagcttgggggtaagaccttccctaagacccaggaggacgtcttttcaaagggaaggtcctctggccatttaatatgatgacatcccagccacagagaactttcggagcctactttttatgctctgtgagtgtgcccatgctccccctcagacccagattcacatgttctagcctcgaccctcatcaaaacttacctccccctataaatgacccctggacaatgcagggacaggcactcccacttcggcctgcccttcagcacagcacgtaccccacacagaagtcccctgctggtgtttctctcccctcctgggcctggagcttcctctctggcccccagcccccagctcccagcctgtgcctctcctgcacccgggttatcatgattactgcttccaggaaggggatgggatcagcagtctgtccagggacactaacctgctaccttaggccaggggattcctagaagcagagcctgaaagaaagcatgtgatttattgtgcaggtgttttcaggagaaacctgtaagggagtgggggaggcaggacgggggcagtgggaggagctaggaatgaggtgcgttcagctggagcccagccacagctgatcccctggggagctctgtggtgtgaagggcccccagagttgtcctacgtggaggtgggcaggtggcgcttctggaccgctgcatgtcaatcattggcagagggacagcccgtaggcatttccctgcaagagcaattctcaggaaacgtgtgccgctaagacccagcactgtcaacactcacagcatgcaatagattaaggggacctgggtggtacagcagcatccattacacctgctccatatctgagattgaagcaactactgggtctgtcactgtcccccacccactctcaagttgggaggaaacagctgcccactcaggaccagcctggcgctggagcctaggctgccggaacggggtcagcgtcacccaagctctggaccagctgaagccctgcagcagttgcatgaaggatcctttcccttccttcccacagatgccacttgcaggtgtttccagcctcccacaggaggcctctccaagaacaaatgcagggctggccaagcccaaaaatcacagcctcagcttcctgagaggagagcacacaccaagttctcaagacgctctaggaggagggaaaggcgtctggagctcccaccaaaaacagcagaatcccctctgctcttaggtcttgcttcctccaaacgctccatgatcagggagcctggagaacgtgccacctttccttggtctcagagcatccccaggaccctggctcgccctacgtggtttcagttccagcctggagacccagcacctctcgtcttatttatgaattgggaagtcctccaagggaggggcagccctggcaggaaagtccagggtgagagaggggaagagctgcctttggtggtcacttttgttttttgtttcctgaattgtctttctggttgtagagcaggggccaggccccaaccacccccacctcagctcccagtgggggtgagggagggagagcaacagttgttctataggctccaggcagccccagtctctgagacaggcttggggaggagagggctttccatggagaattcccagggtggcagaccccacagagccaccacctgaccagtgggagggctgagcacttgccaaagcctggactgaaaccaaggatggggggcagtgggaagaggtggcttagagacacccgacgtcacagcgattctgactccaggtgctcatgagactcccagagcagcggcagggagtgggtagagagaggggttgctttaaacatcctgatgtcagcgaggcatggtggctcatgcctgtaattgcagcacagcacaaggacagcttggggccaggagttcaagatcaacctgggcaacattgtgagaccccatctctacaaaaaataaaaaaataaaaaattagccaggcacagttaatgcctgtagtcttagctactcaggaggctgagataggaggatcgcttgagcacagaagttcgaggttgcagtgcgctatgatggtaccactgcactccagtctgggagatggagtgaatccccttctttaaaaaatcaaatcaaatcaaatcctgacatccagattgcagcccagatcaattacatcagactctaggggaggggcccaggcagaagcactttcaaagcctccccaggtcatgccagtgtacatccagggctgagcgccactgtggaacctggtagggaaagagctgtgtagattgaggacaccaccataggtatttcaaagcagcccttcaagaaaggaaggggtggaattttctaaaagcaaactgagttgggtatttagcaccctctccctactactaatatttccaaggagaaaggggacagtgtagagtgtcccgcagggtctatgtgtgcaggcactgagctgacgcaaagggctccttcttgcaagccagggcaccatgtcacagaagccagaaccccagccccaggccccaagtctgatgcaaaggaaacgctcactggaggcctgtagcttcctcttttggggcctgtgcacacctcttctctgagccctgcccctccctctgaggacaacctggatctcctgggttggagaagaaagttgctggacacagtgctttccactacagtgttaaagaccaactggccaggtctcctgagggaatctgctttgtaaccaagcaatggcagaggagatagtgatccctctgcgcttcggaccccttgtagtggggcaggaagcggtgtggatggcaaacaggaaaccccagccccattgcaccacacgaggaaggagacttgagctgcgggctggggccctgccaagacctagagatggcaagagatgccagatcatgcttcccaaacccaagcctgtcctgggcatgggcaaaatgtgggctgcctcggaaggaaatggcatactctgccttctgccttcctgctttatggaacagaagccccatcactgcctggactcctttaacccctacaccaacctcattacgaaagaaactttattatcctcattttgcagttgaacagttgaggcacaaagaagctatgccacttgcccaaagacacacagctagaaggggcggagctgaggctcaaatccagggcggtgcaggtgccaagcggaacccctgtagactacagcttctcttgaggtgataaggaagaaagtgctttcagccaaaaatcagccaacccaactgtattctggaggagaggttctcccacttgagtgtgtattggaatctctccgagggctcgttaaaatacagattgcaggtccctttgccccagtttctgattcagtaattctggggtggggtctgagaaggtgcagttctaataagcgcccagggctgctgctgatgctgctggtggtagcaggctctagatgctttatcttagtccctccaagaacctcagggggaagacttcactttacaaatgaggaaacagaaggtctcagaggttaggtggcttgtcccaggtggcacagccgacatgcagcccagtgctcctgtggctctctggctgagcgctggatctgagagggccactatgcgagtagcaggtgcaggctggctccagctaccagcccacagcaggctgggaggtctgggggatgggaggcgagtgagtgaccagcccagaggacaagctgtgggaaaagcagaccctgcaggggccagggagagaggcccagagccgcaggtccaggacgtgggcacttgcagtcacagagccactgactctcagtcccttatcacacactgggtgggacactgaggggacaatgaactacccctcccattcacaggccccgcagaccatccccaccccattcccagaaaaaccccgatgcttggtaactgacaggcacagccccttcctggcaagctaccgcactcccatccccggagctgcccctgcctggcccaccgacacaggaggaactgaaacacagcaagggccatgctggggtttcttcaagcatgtcagcctacgaagccgccactcttctgccaccaactgtggcccagcccggcccagccctccctgcccaagctgtctgcacaggcctgggttcccagacgcgactgtggaagatgggaggaagcggtcctgggactcctgccggaaaggcctgcctccagctccaccccagtgggagggtggccaggtgagtgacccagaaggccaccgctgggcccacccagacaatggcctcgcagaccggaggagcagccacatgtttacagggaagccccactggcatccacaagtgcctgacctttaggatggatgttgcagaaggaaattcagagcgcttagccactaatcagagaggcagggcgctggagcgggacgaaaaaggaagcataaaggaagcacagactccagaaaaaagcagctgtgtgtgcgtgggtgtgagcatagctcccggtgtgtgagtgagagtccagtgtgtggcgtgtgtgtgtgtgtgtgtggagggtatggttgggggtggtgtgtatggctgtgtatgtgtgtgtatccacatgtatggtgtgtgtgcttggtatgtgtagaattagactctggctcagagaaactaaagacctagaatgctaaccagccaagacatagtccctcgtgggctccagttcaaccaagtgagacattccatgtgactgtaggacccaaggggagagtggaaagttggtggagacaacactggccccaataaagcaaataagacaagacactccctgacctgcatttctcaaagctgagccagtttatagggtagttttaatgtcctacctggggaagagcaaggtaagctttcctcctgtccaataactacaggatttaagggaggccaccctgcagggagggcctgaggcctgtgtccccaagtgctcccgatggcccatctgagggttcgtctcccagctctgcagagacagagacagacagatccaggcaggtaaggaggggctgcctccgggtcccctgtttcctacaagctcagatttctttggtatcgacacttcctgtttactgagtggtttccaagtcacaggccactcagactcatctctgacttcacatccccttcctcaagggaaccccagcattcttccttttttggtgctataggctgagactctgagctctgtgtgcggagatcttgaggtttcctctactcgccacctggggacaggactgaaaacccaaaagctaggatcgctggcctcctccacccccagaccccggcaggttccttggacttgaaaagcagtgagtgggaagagcaaaggaagtgccgggtgtgtccagagccctccagggtggtcggggcggcagtcattgcggcatatctgacatccaccctccaccctcctttaaccttgagttaacgcatccaacaacgtgtgcggggaaattccccgctcactgcagatctcagacccctcctagtgccaggagaaatggcacatcggggggtttccagaccgtttccaggggaagtttgccacagtagcacattcacaacctcctctgtctgccctgggcacagctgaccaaccctaaaggaaagtcagccccatgaaaagcagaactgctcctccacgtggcccgcagaggcggctctatcaaacctctgtacacccggacgactacctaagattaataaggtagccacccactgggcagggccaggtgaagagaccctgagcgccctcccagactcacgcttttaccaactcactggaggagccgtgggcgcttcggggaactcacctaacaaggaactcacagcatttgcctcagagcaaatgtcccagagaaaagccacctgacccactcccgtgacccctgaatagagtcacgtgacctggtttccctgttctgggtcccgcagcttcctgagctgacctgcgggcaaactctgcctcagcagccccccaactacgtggcaccatggccccgactgtacacaaaagagccatccttgccctaaatgtctgtgtgatgagctgtaagaccctacacggcactttaggaaggggcactgattatctgaggctaccaccacccatctccccagagtacctgaggcctcatggactccaccagttaaagtcccccctgcaccccatgccacactatggacaaaacattcaacaaccagccctacagccactgggatgggtatttagcagggcaagcgttgggcacacacaaaggatgcttgaaatagaaaggcagagatcctccttctcgagcttcagggaagctagtgtccacacaactccacttctacctggtttgaatctctctctctgcacggcacctgctccctcaaagtcatggcgaatcgtgagcccacatttccaaactcatcaccacacagaaaaccctgagattaagcagcagtgggtctgggccccaagggccagctgccagcagccagcaagccatgctgtggtcagctcccaagccagtggtgctgcacgtctgcaccctggccacttttgtcctgtgaggctgagatggaggcagcaccctgatactgcccaggccaggaaggatagtcaggaccacatgacccagcctgagatggaacctccaggggccaaataccacagctgtctcccggggctttcctttcaattgcagaagtaaaataaacattttttgttttattttttaaatataggtcaggttccatggttcacacctgtaatcccagcaatttgggaggccgagacgggaggatggcttgcatgcaggagttcaagaccagcttgggcaacatggcaaaaccttgtctctataaaaaataaaaaattagctgagtgtggtggcgtgcacctgtagtcccagctacttgggaggctgaggtgaggtgggaggatgacttgagcccaggagacggaagctgcagtcagccatgaccacacctctgtactctagccagggcaacagagtgagaccctgtctcaaaaacaaaaacgaaaaatatatatagataaatgaaaagattagtatccacaaaaggacaaatattgtttgattccattgatatgaggtagctagaacaggcaaattcataaagacggtaagtagactagaagctaccaggagctggaaggagaaaggagtgagggggttattgtttaatgggtacagagcttctgtttggaacgacgaaaaagttctggacatggataatggtgatgggttgtacaacgttgtgaatggagttaatgccactaatttgtacacttagaaacggttaaaagggtaaattttatggtatgcgtactttgccacaataaaacataaaaataaattattacatatgaaaaaagatgaagatcgaaatctcgcaaacctccaccacccagagataatcactattgacattttaccatacatccttccagatgctaatatagatgggtgatacagtttgtaaaaatagcacatagtttggtaagctgcttcttaaaaatatatcatattctggtggctcacacctgtaatcccagcactttgggaggccgaggcgggtggatcacctgaggtcaggagttcaaaagcagcctggccaacatggtgaaaccctgtctctactaaaaatacaaaaaattagcctggcgtggtggtgcatgcctgtaatcccagctactcgggaggctgaggcaggagaattgcttgcacccgggaggcggagattgcagtgagttgagatcatggcattgcactccagcctgggcaacaagagtgaaactacatctcaaaaatacatatatatcatattcttccacgttaatagctacacacctgcagcctatgtttttgtagccacttggtattccaaagtatagacatgccatggttaactaatgtatgactgttggtctccatttgtcactatggagtgttatcattattataaataatgctgcgagggacatccccatacacatacttttctgcatttatccaattacatccctaggggcagaattcctaggggtggaactgctgagtcagggacttgtttgggagggttgtcaacagagcattaagagtaaaattacaccaagatgatgaattctgtcatagaaagttctctttctccacacagacttttctccaaacctccttccaaaaacagccaggtgttaaacatttaccaggacgtcactggtcacaacctaggaatgcaaaccatgagcagactctacttgggtgtctataactttgcatagtgattcagaaaggaagggaccatccgttccaaaaaaaaccagtccctccctccccacctctccaggcctcctctggagacacaccatgccggagtcctgaggtgacactgatatacaagacaggcaggattatactgggttaatgtccactgaattcccaggaggaaggactctaggaggggccagtgctgggtgtctcatggtgggtggcacacatgtagtccacaggaaaggttttttgtcattaaaggttttgttcttgtatagacagaaggacaaggcaatgactcttctgaaagagatcaagggttagaagggacatatggaatcatttaatcccttgccttggagatggggaaactgagaaccagagtctcacagcataaacatttcaataatcattagccagacgcagtggctcatgcctgtaatcccagcattttgggaggctgagacaggtggatcacttgaggtcaggagttcaagaccagcctggccaacatggtgaaaccccatatctactaaaaatacaaaaattagctgggcatggtggcatgcacctgtagtcccagctacttgggaggctgaggcaggagaatcgcttgaacttgggaggtagaggttgtagtgagccaagatcgtgccactgcattccagcctaggcaacagagtgagactccaactcaaaaaaaaaaacacaataataatcataatcactaaatgcaccccagaagtgtctcgcatgcaggtgaggttcaaccggtttggggcagcgcttgaacatatcccatgacttggatgcctaatacaaatcttatcctcccctccgcatgtacagaattggaaattaaaatcactggggtcacatgctgacttagtcatggcccgatgtgtgctggggccagatcctactggctcccaagtgccaatggcgcacaactcttcccaactgagtgttcactgataccaggttggtagagtgaagtcagccatagtgggaatatttatttatatcatataaactggaaaacaccacaaagcagggcttcccccaaagcccctaccaagagccgggtgttaaatattcaccagcacgtcgctggtcacaacctaggaatacaaaccatgtgcaggtgacctcagtttcctcacctaacctaagagcagcctctctccaaagcactgtaactctctatgttccaccataatacacactctgaaatccatcatagcctgcttctagccagcaaatggttttctacatgcttgctatgtgccaggctaagcacatgatagcccatttgaccctcacaatattgctgtgagatacttattataattcccatcttacagttgtggaaactgagtcttttcttttcttttttctttcttttttttgagaggaagttttgttcttgttgccaaggctggagcacaatggcgagatctcagctcactgcaacctccgccttccaggttcaagcgattctcctgcctcaggctcctgagtaggtgggattacaggcgcccgccaccatgcccggataattttcgtattttcagtagagacggggtttcaccatgttggtcaggctggtcttgaactcctgacctcaggtgatccacccacctcggcctcccaaagtgctgggattacaggcatgagccactgcgcccagcctgaaactgagacttttaatgacttttaactataagttaaagcctgtcttaggttggtttcacccaaaagtagatcgtgaaacaagaattcaagttcaagtacaaagggagtgtacaaagtacaaagtacactccctttgtacttgaaatgtacttgagatgaggaagtgagcaagctaacactatgagcaattgagattcggtcctgcaagggaattcttagagacagcacagaacatgccccaaacttatctcaaaagagaggcgaggaagctggagtatttgcacaccttctcccatcagtcattggttgagaccagtggaacatgggcaggagactgacagcatctattacattattcagtatcccacagctaggaaatggtaagatgcaattcaaactccaaatccaatactctttcatgacatttataaaaatgagcagttaatcacacttcactgaatgccaactacggttaaagcaccgtgctgatgaaggaaatctactttgccaaatcactttgggtcgacatgttcaaagaaagcacaggtatttctctgccaattttcaccaattgaaggaacaggaaagggccttggaagtcattttgcccgttccacaggaatggatgagagggtccctctctggttctgccacagctgccttgagcagcagcagttccccagccccaagctgtcaccgcaaacagcagcatcaacctgtgatgacagactttagagtctgccatcccagaagtgataaaaaatgacccactggctgcatagcccaagtcagaggatgtgccaccctccttccctggtgcctcctgccccattcaccaacccccgcctcacacggccatgtggtccacagtaaccaacaagcaggccaaataaatgaaaccagccgtgagacctgtgggagctcactccaccttgaggacatttatacattcttctgggccaggcacagtggctcatacctataatcctagcactttgggaggctgaggcaggaggatggcttgaggccaggtgtttgagaccagcctggataacatagcgagacttcatctctataaaaaaataaaaataaaaatttagctgggtgtggtggcatatgcctggggtctcagctcctcaagaggctgaggtgggaggatcgcttgggcccaggaggttgaggctgcatgagccatgattgcaccactgcactccagcctgggcgacagagagagaccctatgtcaaaaaataataataataataaatataaataaaaaataaaacttcttcttggagacagggaagtgtttaaataggacagtgtgtcattacagtaaacaactggacgatgttgtgaagagtattagggaggtagcaggagggaatttctaccccttgctttataaacccagctgtggcagttctcagctactacagattgaagatagaggctaaacatcttgttccattccaagcacactgctgagacctgccctgtttctcgctctggaagagaggaggagatgagtcctgggactactcttggggtcactcagtccatctcccagcctctccgtgagactctctggcaacctgaccctgcctttctgcccccacctcccactcagtaaggacacttcctgccaaaatatcctaaagaggactgaaagtaataatcaggcccatgttcttttgtgctttgatgacaggtctcctctctggcaagcagcgtcgtccagccctctgaggcagcagatgcacaccctgggcacttctccagctgactcgctcagccattcctaagcagctcacgtatggaacgcagacacgaagcctggctccggggcaccaggaaatagaccaagaagtcaaagcaaaaccaatagcaactgggatgtctcaggtgggtcagagcatccaaaggattgaaaacaaggtgtagggttgtccgccacaccaactgggctcctaagatggcacaaactggcgagaagacctgaacctccaaacagaagccatgtggagatggagagaggtgggccgcagagcactagggacagagtgaggccacgctcagggaagtggggatgatgtggctgcagatacagcagatgtgggcgcagccccagttggccagatatggagggcacacagtccccttcccctggaggaaggcacgaaaagggacctcagatccctggtctcctctcagccaggctcctcaaaggggccatcaccattccaacccaatttcaacagaataaaaatgaggggagtggagcacttgggatatgtctaggctgcaccccaacacttaccatatgtctccctgatattccacctctgctcctccatctgctgaaggaggagcggaactcaccttccagcctccccagcacagggaacccaagctgtaccagtccacactccacgtgcccaggcaggctgcacgctatgcctccatcttctcccagggcaagaacacccgctctttccaaaactactgccctctccaagctcagccatcatttgaggccctcttccacccctgtgaggcctgctggactgccacagcctaggcatcaggctgacctgtccagaggagaaaacacagctactgcccaccctcaaagcccccacgcaagggtctctgatcccaaatggccaccacccaggtagatgtcacactgtgtccctgggacactatatttgaacacaagtgttttggtttttttgaaaattaactctcctcaaacaacccgatatatcttcgccatgcgaggcttctttaatccttcagaccacctgcagaaaaagtgcctggtaagtaaatgtggatttattagtaaaataagcctagctgcagattcctcatccagatgttcctgaaagaaggcccctggctctgtcttcccggctgtttaaaagaatcattgtttctaattctttcctcccattgtactaagatcaactgtggcaggaactgggtccccctccaggacaaattgttgtttgtcagctgattggttcatacattcattcatcatttacaaggtacttactatatccccaggctgccgtagacacagcctttgctctcccgaaaaacacgttctaggcgccgggattccagatacctgggaaatagagtgcacgcagctgttgagaggcctcgcgcttggcttctcctatcactgaggcgcagaggtgctgtggacagcccagacccacacggcgcccgaggtgaaacagaaccctcagtctccctatgaggccactggcactctcggctgtccccagagctctccgacttagagctgaatgcaaagtaagcgctcgaaatgcagaagtagccggggccgcccacggcacctgcctcgctcggggcgagagaagacgccaggctgaggtcccagcgacctcaggcaccagctccgaaggagggcggggagaccgcaaaggggaagtgcccggagggccaacggcccccgcgcaccctgcgcccctctgaagcgcgccgcctccccgcgccggggactgggacctgcctctggggaatccgcctagaagacggcggcggactggggtcgggcactctccagggctgtcaggccctccccagccctgcacctgccgcgccgccccacctcgccaggaagtctcagagaccccggggatggggtgggagcgccttcccatcgcgggctcaaaaagaaggaaggacgcccccaggggtcgtagaaggaggactagctccaagccacaactttcttcggacccaaggcaggccggctggggctccgcgcctacacggcccctggcgggggtccgcgcgccccgggagccccgcggctcggggaggaaagaggagacaagagacaggcgaggattacggggctgacccagccggggtagggaccatcgtggaaaaactttggcgaggtggggggacgcggaaagagagcggcccgcgccctgcaccttgcgccgggcatcccgcgccagtgcctcgctcccagtgccccgcgccccgcgccccgcgccttgccttcaccccgggccagctgcatcgcgcccgcgccgcaggaaccgtggagttggaaagtgggggcgccgcggctggggggctgcttcagctgcgcctcggccagcgatcggcgggccgggctcaaatccagccaggctgggcaggcggtggccgcgcgactggggaccgggcgccccgccctcctcgctcccctcctccttcctctccctccctccagccccttggcctttttcagcccctaccggatctgctcgtccgctgtcctctcttttctctcgctcttcatatcactctccaccccttcgccttgccttcgcctttcttcctccccttgtctcctgccccctcctcttctcccctcccctctaggggcggagcttctcccctccctcccagacaatgctgtggctgcgtccccttccccgccagctcgtccaggctcccgccgccagcgattcttccgggctgggggtggggaggtggggggggagtgcagggttggggaggatgagctggctcccctcacctccttgctgctgccctctccaagagggatggagacttggcccaagctcctcggttcacccggagctgtgacagccactcccagggaacagtcacgctgccctaccaagcccacctccagcggcctggattccccaggcagaggttgtgggattttgttttttctaacatcccagcttattcccaaaagggtttgagccggacaggggctaaacaggccccttcgacttggcgggccggccagacgtgacagcaatgccaaggaggccaagtttctttgtccatttctcacctcccccttttccatccctggacctcctggcgcccccagtacacagaggcccttgagcagcccggctgcaggttccctatctactcagagttctccccctcacgtgcctatccccaaccctgcagtgtctgcggaccaaaggggaagggagcctcaggccaacccccaaggtacagccagaccagctcatccagcctggaagccaagcattctttactaaattcattgtttggatcttggaatgtgtctcccttagaaacaatgttataaatggtgatctgcttcccaggccagccacaaaagtctgttgaacccaaaatgcagctgtagggtggtgctgagaactgtgtcagctaccctgaaaaaggaggccactgatcagctttatttgtagaaaaaatatgtatatatcttctggttctttcttcttgggctataaacactataaattaaataagttaaagttctcccattaagtttccccatatggacccactactctatgtgttaagcttctttcctttgcaggtaatagaaataaccttgggggaatgcatttgcagacgcagtggtttctcgataatctcatctaatctcagtgtcagaactgcatggagagctcagtataagaggcaaatccagagcctaaagggcttcccgtaacccagaaagtcttccctgaggggttctttcttctccttcatcacagactggccctccctgcaccccagacacttggtgaaaggtggccatgacttctatctccggggcttggagctctgctgctcaggaaagcagccagatgctgctagaatcccttattctctaatctaatctcccaaaagagcagctcatcctcctgtgacagtggggctagggatgagctcaggttgtacatactgggctaccagaaaccctgaacctaggccctatttaaaactaaacccattacttttgtttttgtttttgttttgttttgtaattttgagatggggtctcactctgtcacccaggctggagtgcagtggcatgatcatagctcactgcagcctcaatctcctgggctcaagagatcctcctgcctcagcctcccgagtagctgggattacagccatgtgccactatggccagctaatttttgtatcttttgtagagatggggtctcactatgctgtccaggctagtcgtaaactcctggcctcaagcaatcctccccctcagccttccaaagtgctgggattacaagcacaagccatcttgccaagccctgaacacatttctctctacttagattctccatcttggtgaataaattgattgattgattcattcattcattcacgcaagtcaccagaaaacatttttccattcatcaatttccccataccaaagccacaggtgagaaaggaatagcccttcatccttcatccttcaaggcagaatatagcaacacatctgaacagggataatattttgcatatattaaactaataattaaagtctacccttaaatcatattttctttttttttttaagatggagttttgcttttgttgcccaggctggggtgcaatggtgcaatcttggctcaccgcaacctccacctcccaggttcaagattctcctgcctcagcctcctgagtagctgggattacaggcatgtgccaccatgccctgctaattttttgtattttttttagagatagggtttcaccatgttagccaggctggccccgaactcctgactttgtgatccacccacctcggcctcctaaagtgttgggattacaggcgtgagccactgcacctggccagaccgtgttttcttataggcttctaccaccagaggccagaccaagaggctcatggcccaggaagcaacaggtgagcattgtctagaattgtctaaaattctccaatagaaacacaacttgtggctgggcacagtggctcatgcctgtaatcccagcactttgggaggccgaggcgggcagaccacctgaggtcaggagtttgaggccagcctggccaacgtggtgaaaccccacctccactaaaaatacaaaagaaatacaactcaagccacaggtgcaattttaaactttctagcacccacattaaaaatggtaaaaagaaacaggtgagattaattttagtaatagatttctatttaactcaatatgttacaaatactatcatttcaacgtgtaattaatataaagaaattatccatgagacatttcacatcctagtttcatactagggctgaaatctagcgtgttttttgcttgaggacatctcaatttggacattaaaatttcaacaaaactacttgatctgaattcagattttgtaaaacttctagttgaaaaagtagattcacatgcccaagttgtttcaaacatacttaaatgttgcccaataactgaatcgaggatcggcatatacattttcattttaattaattatgaataaataaacttaaaattcagttccggccgggcgtggtggctcacgcctgtaatcccagcactttggtaggccgaggttggtggatcacaaggtcaggagatagagaccatcctggctaacacggtgaaaccccgtctctactaaaaatacaaaaaattagccgggcgtggtggtgggcacctgtagtcccagctactcgggagtctgaggcaggagaatggcgtgaacccaggaagcggagctggcagtgagccgagatcgcgccactgcactctagcctgggtgacagagcgagactccgtctcaaaaaaaaaaaaaaaaaaaaaaattcagttcctcaggggcatttgccatgttgcaagtgttcaatagccacaggctaccagattgggacagcacaggtttacagaacaaggaggccactgatgagtttggagtctcaaagctaagttccttttttccttagcaaaacagtagtgggaatgacaagcatggccagagaaagaaaaggagcttctgcatttctttgtctccccgtataacagctggagaggcagatcagagttctcctgtgtggcttgggaaaaggaggctatgcagagaactgggaggcccaaagcccactcctcagttcccagtggattctgggaaaagggaggaagacagaaagtcctggatgctgcgtctcccctatttgtgacctttgaccttagagcagaggtatgttggtgggttaagtggagttctggggatagaatcaaggattacaggccaggtgcggtggctcacgtctgtaatcccagcactttggaaggccgaggcaggagaatcacctgaggtcaggagttcgagaccagcctggccaacatggtgaaaccccatttctaatacaattacaaaaattagccgggcgtggtggtgggcgcctgtaatcccagctactcaggaggctgaggcaggagaattgcttgaacctgcgaggcggaggttgcagtgagcagagatggcgctgttgcactctagcctgggcaacaggagcaaaactgtcaaaaacaaacaaacaaacaaacaaacaagaacaaaaaaaaaaacacggtctgcccactcgcttctcctccaacctagacagcctcacacaagtcagctcagtgcagcaccatagctacacagagggagggcctgggttcagcttcctggggtcacccacaatccccgtgtggcatagatgtaatgccaaagttcccacctgctcccaaggaccaggagcttcagagggaagctgagttgtgtgagccacaggcttttttaacagggcctgtcttggtttgagctccctcaagagcagagcctgagacaaggatttgggtgcagatcatttactgaggacccagaacgcaggagtgagggagggaggaagtggagagtggggaaggtgcattattggacaggttactgctgggggcaactggggcttgacttctctggggaccgtataaggaactgtgtagaacacgcctcagaaatatctcattaaaggtggggggtttggggcattcttctgctgactcctctcattctcctctagttgagcttacctcctcttacttcctggtttgtgtggacatatttgttctaaaagaaacatctgaggcagaaaaacaggagccggccgggcgtggtggctcgtgcctgtaatcccagcactttgggaggccgaggcaggcggatcacctgaggtcaggcgttcgagaccagcctggccaacatagtgaaacaccgtctctactaaaaatacaaaaattagttgggcatggtggcgcacacctgtaatcccagctacgtgggaggctgaggcaggagaattgcttgaacctgggaggtggggggttgcagtggcagtgagccgagatcgcgccactgcactccagcctgggtgacagaacaaaaatccagaaaaaaaaaaagaagaaaaaagaaaaacaggagccattgtcccttaaggtggaatgagttcctgttcgtggagctgtccaccactgccctgctgggatgagaaatgggctgaggggatgcgacacagaacaaacaaatcatctgctctaagccccaggatgaagaggggcaggtagaccctggctaaatcaggggctggcaggaggacataatggagacccagagggtgcatcagcgaaggccgagtgaagatcagagtgcagagatccgaaggagcctggagcacccagaccttgaactgcacacgctgcaggcgtcagcagtagatgccagcccagtactcaggaatgggaccagcccgtccagcattctgctttcaagggagggtccagagcaggccatctgcagcggggcccagggaggacccagaggcctccccgtgatcctgagcacgagcctcacttgccaccaccagagtaaggttcaatctctcccaaagatgcgtcttaaaaagagctgggcaggaaggaagaactctgagagagggtttgcgtaagaagaccagagggaccatttagtattgcataagacttcatttaccagactaatattcagatatttttcccctctgctatccaggaggtaagaatttacagaggaagatccaatgagatatagagaaataaggaagcctaagtgaggtctacccctgggctgccgccacctcttcacacgtctggtgcaccagcgtggcaggccagctggacatctgcttgacgggtgaaaaaagaccctcttgggagagaatctgcattctaaagaaagaagaaaacaagtggtaacgcggcttgagttgacagaaggctaatgagattgtcactcaactctgctcccaatctggtcccctggacacacaggagggggctcctgggaagaagaaggggctctaggttacaactgaaggggctgttttgtaaacctccgggtattctcagacccaagcaaccatgttttgggaaccctcctgctgagtaatacttaaggggccaaccctccactgttcagcttctctatttcaagagcttgttatgttgacaacactacctagaatgagacagcttgattgccaaaacggtcacgactactggctcccagcacacttgctgtttgcaatgtgatgctgcagttcctccaataaggaagtggagtctacttctccaccttgaatctgggctgacagtgtggcttgctttggccaatagaaggaggcagaagtcatgttgtgccttttcagagcctgggcctcaagaagccttgcattctcccactctctctattggaacattgcctctaccactgaacacacctgagctagctggctggaggatgagagaccacatgacccagagccaagtgggcccagctgtcccagccaaagccccaggcatgtgaaagagcccaaccaagatctgtcaagtcccatacccaaatccagagctgaccaccaatgcatgagggagcccagctgagtctagcccaaatagccagctgataaaaagcataaacaaaatagatggttgtcactttaagccactacggtttggcatagtttgttttatagcaatagtgaactgttaaagaacttaacaggatactgcaatcaaggctgacgcgaccagggtattgagcagacacaagtctgaagtcccctgtatttgcttatgagcttgtgcgaggtacctctaggaatttgtccccactgccagccctgtgcccccgcccttgcccccaccaccaaagcagcagaagaggtattttcaaatggctcaagtctgagtgagttggtgacatttagatttatggctgttaatgtgactccatttgttctcataaacttgagagacctagggaaatttgagtaacaaagattttgtcactgaactctacaagtttatctttcatggggcaggactatcttaattaaagagttcattttatccaccactaagcaatttccatagcatttaaaatatttatatgacacagtgtctggatccatccttgcagatgggagagtggattgaagctctcgctcagctgatatctaagtaggctcatgtccacatgtcttgggccccagacaggagacctatcttactaggctttccctcctcagttaaaacacaaacaggtgctggtaagaggaaaaaaaagaaaagaaaagaaaagaaaaggacctaaagtacataacctaaacttactcatttccaccttttgtctcttttcacaaaaagtatttgatagacagcctcaaggctaaactctctcttggccaccttcctgctaaacaaagtgcttataaacaatttggtaactgaaccatgtttcagattacgtgggatatgtcataaaattttcctaggaatccattccggtttttttaaccccagggttacattccaccaaagctccccttccatttttggaaggaaataccaattacttggtgggaaaaatgttaccctatcaatacaaattgaatacacgttcaaaattatagatattgattatatatatgtatatatatgtatatatatgtgtgtgtgtgtgtatatatatatatatattaccatggtgaaactacacagtctgtgtttggcataggaaaggccaatctaccaccacacccaccatgcacacacacatgcacacacacaactctgttgttcagagctttccaatgagccagaaagagacttcttgctaacatttaaggaagactttgtcctggatagatgataattgggaccaagaattttctcatgaattcagaaacttaatgaaaaaaaattatctataaacaattactccaagaaaagttacaggccaggtgcagtggctcgcacctgtcatcccagcaccttgggaggccaaagcacgcagatcatttgagtccagaagtttgagaccagcctgggcaacatggcaaaaacccatctctgcaaaaaaaattaaaaaattatctgggcatggtggcacgtgcctgtactacttgggaggctgaggtgggaggatcacttgagcccaggtggtcaaggctgcagtgagccagatgatgccactgcactccagcctgggcaacagagtgacagcctgtccaaaaaaaaaaaaaaagaaaaaaaaaatcaagcaagcacaaaagaaagaaagaaagaagacaacgaaaagaaaaaaaagagaaattacaagtgcaccagaaaagaattacaagacaagggaaagaagagaaatataagctaccaggactcaggaaaagaagtgaaagagaagaataaaactatcacagaaacaaaagaccgaatggaggagcaaaacgctatgaaaattcagctagaagcctggaaggtacatttcagaaaaatgaatgcagtaacatggagaataacagtgaattttaagacgagaagaaataatagatatagaacaaatgcagaagaaagtcaacatatgtataattggcattcaaatatatacactaaaaaaaactttcctaaactgaaaatgtgaatttatagattgaaagaccatactatgttctgggaaaatggatatagttttttctaaactatgcccaatgtatgtttacagccaaatgtatgttccttgagatatgaggatgggggtttttgtccttttttgtttattgctgtgttcccagtgcttaaaataatgcccccaatgaacattcagtaaatgaattgctaaagtaacagattaaccaataccaacatatcctattaatagtgccatgcttcaaagataaagagtttctggttattcagtagaaagatcagatcatccattaaaaaataacagcatgtctttgctattgtgaatagtcctacaagggccaagtgtggtagctcacacctgtaatctcagaactctgggaggccaagactggaggatcacttgagcccaggagttcgaaaccagcctgagcaacacagtgagaccctgaatctacaaaaaaaatgtagaagttttagaaaataatgctgtgatggacatgtacaccatggaatactatgcagccataaaaaagaacaagatcatgtcctttgcagcaacatggatggagctgtaggccattatcctaagtgaactaacatagtaacagaaaatcatatactgcatgttctcacttaagtgggagctaaacattgagtactggggcctacctgagggtggagggtgggagggaggtgaggatcgtaaaaacttcctatcagatacaatgcttattatctgggtaatgaaataatctgtataccaaacccctgtgacacacaatttacccatataacaaacctacacatctacccgtgaacttaaagctaaaaaaatcagattgactacaaacatcagcacagcaagattcaaagctagaatacaatgaaacaatcttgtgccacatatgctactatggtgtcctcagagaaagaaaacatgattcaggaacttcatatcaacccaaactgtagtccaaataaagaacatgcatatattttcaaaactacaaaaattcagctaccttgaagaaaatacagaaagaccaagtttagtaaacaaatgagaaacagaagcaaaaacaccaataatgagcactgaatacatttatgtttcgggattacaattaaaacaactattggaattatggttgcgaaacaaaacaaatgctataaaccattataaagcagaaactgtaaaacccaatgaaggtaagaatgcgttaagtatcttgattttctcatttttttgtagttgaaggccaagaaaagatacgtttaaagtctgtagcccagctattagggatacaaataagtgtgaagttatacaagaaccctctagagagaggctgttggccagaggtagcatctgcttctttggtggtcttggagcttgagagtgttgatgtcatttggtgtgtggggaccaaagataatgagcaaactgtaaaatgcttgactgtcttggacaaagacgatttttctcatacaaacactcacagtgtccctacggaacagtaaagcagtagaactaataatagcaataaccagcccaaattgaatggaggagagaagagagaggatttgggagaaagtggttttgtcattactcttggtgaagagtcaattgattatatccgaagaaatgtaggattgaataaattatatacaaatatgagtgttcttttgtactatttgacttccttttgttccatgtgcatatattaactagtcaaaaaaaaatagttaagccaaggcaagaggattgcttaaggccaggactttgagatcagcctgggcaacatagagagaccccatctctacaaaaaattaaaaaataaaaaattagacaaacatggtggcttgcccctgtcatcccagctactcaggaggctgaggtgggaggctcacttgagcctgaaatgtggaggcttcagtaagctggaattgcaccactgcactccagcctgggtgacagagtgagatcccagcttgaaaaaaacggttaaaaagtaaagatactagggtcagggaagagggtcgggggaaggcaggtagggagaggtgagctggggaagcaagtcatttagatactggaggggatggatcctgagagtatccagcatgctgccctctctctagggttatatctagaaggatgggagtggacaataagaccgtcagatttcatacgagtttgggatctgaaggtagagacctgccccacttcccatcagtcatctggagtaacatggtacccatggcatagggctgcccaggcatctttggtggcagagggacctaagtagacccagagagcttctaggggatgtaggatgttataggagagcagctaacatttcccataaccctgagaagggcatggaagtcagatgggagaaagctggggaactgagggcatctcatggttggaacaaggggacccatgagtcttgccagagaccacatggaagctcaaacatcttgggagtagccagggaggaaggatgctgtgcccagaaccatgacgacatccatgttccatcagcccaccaccaccgaaacagagatgagaccctggcgagaaggtgggaatgggactgcagaaaggaacatttcagaagtaagtaaattttaacctaaaatgaccacatttctcagaaattgaccagcatgatttttgctgccagccaaatggaggttcaaagtagagattaaatttcatatatatatatatatatatatatatatatattttttttttttttttttttttttttttttttttttgttgagacagagtctcactctgttgcccaggctggagtgcagtggcacgatgtcggctcactgcaacctccgcctcctgggtttaagctattctcccgccttggcctcccgagtagctgggattacaggtgcccgccaccacgcctgcctaatttttgcatttttagtagagacggggtttcaccatgttggccaggatggtctcgatctcctgaccttgtgattcacccacctcggcctcccaaagtgctgggattacaggtgtgagccactgcgccctgcctaaattatatttttttaaaaagtttcaggtgctctgtgtggaggttaaaggtagagaccagggatgtaatacagtcactacacagaagcccctaggaagacaggactcagtgtagaagagaactccctcataaaaggagtgacatctgggtcaggtcttaagggtgagatggggaaggacattctaggcagaggcagcagcaagttcaaagccatgaggagcctggctcgaccagagaacagcgtgtggtccagcgtgggtggaacagaaggtgggaggtgagaggtgtttcatgttccacttatgcagccaagaaacaatattcaagacaagtcaaattccctgattcctgtcgtgtttcagggacacagctcaccttcccctatgtgtgtacttggtccaaaccacagggccagacggggagccaacgccacctctcacggcgatgcagagccagctgagaggagccagctgggagaagtttcttggaggacagacatgcttcctgggccaagaaatatcaggaagaagccaaggaggggagggctggacagcacagccagcaagactggtccattgacccattccagcctgtcatgagatgcctgagacgctgaccctccgcccagagctggccaaatctctgcagatgcaaagccaactcccagggctttaccactttgagactttgaccgcccatccttcctgcccctggcccagcccaccctcctccgtgcacagagatgaacgttcagcatgttctctcccacacttgacctaatcgctttgctatggagacttccccgacccagcaagcagccccacgccttcctgctgtgctctgattgagaacaggcccaagctatccaggccttccaacaaccttaacctcttcctccccagacccaggcaatcaggaatggtggggaggagagacttgaagcatctaagtgactcaacagagaatgtaattatgatatccagtcaattggctcttgttctgaaggaatgatgacaccgtacccaggcaagcagggaggagatgggcataagatgagatgggagaggccatgtcatgccttgtattgcaggccacgatgaggagctgggggtttcagtcatattgcaataggatgcccttgaatcatgggtttattataggagttagaccttatgtccttgtgggaaaagctggtgaggtaacacctgtaaggatcactggaagatcagaaagatgtcacagtggaaacgatgaaaaaaatctacggaaggctgttctttgtgtgtagtggtaaacctgggtcagccagggcaggctacaaagaaaagcttgacacgaagtgggaaaaagcaaacatgaatggagacccaggaagccacagcaaaacccatgaggacaaattggaacctgtctgtctttcatacatctggagtgacctacagaagacgtctgtgggctgggtgcgggtggctgacgcctgtaatctcagcactttgggagagtgaggcaggaggactgcttgagcccaaatgttcaagaccagcctggttaacatggagaaacccaatccctacaaaaaaatacaaaaattagccgggcatggtggtgtgtgcgtgtagtcccagctactcaggaggctgagaagtgagaagattgtttgagcccaagaggtcgaggctgcagtgagctatgattgtaccactgcactccagcctgggcaatagagtccctgtatccaaaaaatttaaaaatttaaaaaaccctcagagctgcaaatgtaggaggtccaatgtgaggagcaggagctgtcggtctgactggcctcaggcagatgaggccatggggatggggacagatgcagctgtggtggcatctagagcctgcacccatcttccaaatgtaacagctgctgctgctgtctgtctctttccaaatcttgcacaagttactcctgtggccagccctgacctggacacacaaaggggagggaattctgggagatatgactccagcttagcttggttgacacagtacaagctactgcagagtccaaaacagagatggagtatagaataaattgagagctttctgtaattctggttttgtttagtgttacgaacgcgcttgtataaacttaggattgtttctgaatgtggttttgagaagttgtatttgtaggagtgatggcataggatttctttgttcccaattttttttttttttgcatttttccctttacttgataagtgcatttgccttctgtttttctttttgagatctacacacttaaaccctttaatggctgtaccattagaagtgcttgatcttaaaaaaattgcaaggggatgccattgaaaccctttaaactaggaaaagatgcaatcaaatttacaataaaaatatcacagtggctgccgtttatacaatggagtggcaaggtgcaaaattaaaacatgtaaactggttaagagattactatggaagttaagaaacgaaactgtggtcatttggactacaggggtggatcagtcagctattgccacagtattgctgtgtaactaacaagccccttaaaataatgataattggtagggagcaggtgggatagctctatttcctgctgcagctctgccctgtatgtctgtcattctccaggccccagaggctagccagagcatgttctcttgatgatgtctgaagtgcaagacagcaagccctgccacacaagcacatttcaagtctttgtgacagctcattggctgaagtcagccaacacggccaagcccaaggtcaaggcatatggaagaacataccacctttagtgggaggggctgcaaaggcacatggcaaaggatatggactcagggtgagtgaagaactgagaaaagtgatgcgatctactatcaggggtaacagtggatgtggagagacaagggtagactcaggaggtggttgcaagaaaaacccacaacatgtggtgatagattgagtatggaaaatgacagagaagaaggaatcactctgacagccaggctttgagagaggctgatggggctggaggagaagcatctttggtggagagggacggcaatgtttccagtttgagaggcatcccgtggtggcttcaggtgagtagagggtcctaagttctggaacttggaaacaaggtccaggtaaaggtttagaatagtcattggcttgtcaaagcctaccaagtgctttgtgaagtatttgcttgtggcaataacttgtgacaccacaggagatctgtcctcctttccccagccccacaccctgccacggacctctgaagacaccagaccccacgtgattaagttcaaggggcatcatgctgccatgtgagaagacgattctcactcaggatcagagaggctgaaaggagatatctgcatttgggtggagagagggtttttgctatttcgttttgagaaaattatttttagaagcttcagagtgatgggcaacttcttcttatctccactcttagaaggagacatctgtgaaattcagtggtaattgtgtgtgtcatagttccttcaaatgcagacactgagacatagactcgaatgcaagctgcagagctggaaggtgcacggtggggaagtgaaggacccccacatggggtgtgtggagcaggttaccatcgtgggacactgggagggcgcagtcccaccgggaactctgggaaagtgtagagcatggttctgctaccccacttgagggaataaagagctgacactgatcccttcaatcatgagttgagggctgccctgcgggcattatcccctggcacttcctgtttgttcaaaatgttcccatgggcagcttcagtcaggtaagtgctgacaggaggtgggtggacactgccagcatctcccacagtggggaaagaggtcatcctgtccatcacacagagagcacgaaaaggaaccctccaccctgcaacgcggccagagccacaggtgttgggaggagggaaaatagtgatcacttccagagtttctgggagccatgggttctccctgggatgccctgatgtagaggcaccttaagagagcattccagggatgcacgtggattgttcccctagggtgggattgacaggggggtagaatgtgacttcagttctgggggaagtgccccactcaagaatgcaggttctttggctatcccagatgagagaggcagcctaagtggccctgaggtgagagaaaaggccacttggacatcagtagccacacaattactgatgtgtgtgttcctgcctctcccacttctggggtacacctgccttccgttgagcaaactcccatgatgcccaagccttaagcagaggaaaagcaagacgtacagatacttgaggccaaaatctgtcagtgttggaaactgttctctgcagctgcaggggaatgcaagtgggccagggggatagagaacaggaatctgaatgcacagtcagacagggccgtggaacacccccaacccctaggcaccatactgtggccccatgctctatggggctggtgagcctggagtgagggaggaaattagtgggtggggtgtggcagtggaactgtaccaaacagatcctgagtaggactggaagccccctaccaaaatgcctgtgctggggaagaccaaaggaaaattctaatgagttctcaacatcaagagaagagcaatcataaaacaaatgtttcatttttgaaacattcaatttgtgcttctgctacctcagatgagaatacgaaccatggccatggggagagtgggcagcctgaagagaaaaaagacccgaggtagggtctgctagttggggtgggagcttccctttaaaaccttttgtaatttccccatctgtaagattacgtcctgaaggttcatcacggctgatgtcttaatgtggcttcacccaacagcagcccctgcgtattatctattgctacagaacaaattactgcaaaagtttgcagcttaaaacaataacaaacactcattatttcttacagttattgtgggttatggatttgggagcagctcagctgagtggttcaggctcaggggctctcactgggttgctatcaggatgtcagctggagctgcaatcatctgaaggcttgactggggctggtgaatccacttctaagatggctcaggcagatggatattgtcagagggccttggttctgtcccttgataggcatgcttgcatgcatccatggcatgattcaaaagaacaaggtggagatttgtaaagtcttttatgacctagccttggaagacacacatcacagctactgtagtctattccttagaagcagtcactaaatctgcccgtactcaagaggagggaaattagctccatctattgaagggaggagtgtcaaagaatttgtgaatatattttcaaatcaccacaccttgagacaagaatttgggtgcacatggttccccctgtaggcaactgcagctcaatcctgtaggtcctctgcgatactgtgtggaacattcctctgaatcatcctatcggagggtagaaggctggggcattttcccactaagtcccgccttgcattgttaagattaagatcctgcctccctcacttccaggatatacctgctgtcagctgaggaaactcccatgatacccaaaccttaagcagaggaaaagcaagatgtacagatgcttgaagcaggaagctgtcagtgtgctggaaactgtcctcctttgcagctgcaggggaatgcaggtgggccaggggtgtagagaacggggagagaacatcatctgctgaggcctacagggcagcccattagccagcccttgctagaggctccattttcattacttacttctctctgttcacattgtatgcaccaacaaggctgaagtgcttgttgctccctgcacctgctctgctgttttatgcttccttgactttgctcagtcagctgccagaccccagcatgaacaaaaaattagaagagctcctagaaagagttgagaatagcaccaaaaaaaaatttctggaactaaaaaatttagttttatcatgaatatttacatacacacagtaaaacatataatagatctccatatgccatcagccggatttaacagccataaagattttgccacacatgtttcatcaacttcttgtcttctgtcagtaatttttcccattaacctttaaaactgtgataaaatgcacataatttttccatcttaaccatttttaagtttatagttcagtggtatgaaatacattcataatattgtcatcactatccatctctagaactctttcatattgtaaaactgaaactctgtccccattaaacaataactcttggcggggcgcggtggctcacgcttgtaatctcagcactttgggacgttgaagtgggtggatcacaaggtcaggagttccagaccagcctggccaacacagtgaaaccccgtctctactaaaaatacaaaattagctgggcatgctggcgggcacccgtaatcccagctacttgggaggctgaggcaggagaatcacttgaacctgggaggcagaggttgcagtgagccgagatcgcaccactgcactccagcctgggagacagagctagactccgtctcgaaaaacaaaacaaaacaaaacaaacaaacaaacaaacaactctccatctcccccctgctcccatcccccagcaacagccattctactttctatgattttgattactctaagtacctcatataattggaattatataatatttgtctttttgcgactggcttatttcacttagcataatgtcctcaaggtacaacacagataaatgtgtcagaatttcctctctttgtaaggttgagtggtgttccattgtatatttatacaacaatttgcttatccattcatccataggttgaatggatttgcttattcattcaacccatgaacacttgggttgcttccatttttttaacttgtgaataatgctgttgtaaacatcagtgcccagatatctttgggaccctgctttcagttcttttgggtatgtacccagaaatgggattgctgaatcatatagtaatttttttttgagacagcctcactctgttgcccaggctggagtgcaatggcacgatctcagctcactgcaacctccacctcccgggtttaagcgatgctcctgcctcagcctcctgagtagttgggattacaggtgcatgccactcgcccggctaatttttgtatttttagtagagacagggtttcaccatgttggccaggctggtctcgaactcctgaccttgtgattcacctgcctcagcctcccaaatcatatggtaattctattactatttttttgaggaaccaccatactgtttttcatagtgatataccattttacattctcaccaaccgagcacagggattccaatgtctccgcatcctcaccaacacttattattaatattttccattttttttgatagtagccatcctaatgggcataaaatgatacctcattattgttttgatttgtagttccccaatgattactgaggttggacatcttttcattgcttattggtcaattgtatattgtattgtattctttgaagaaatgtctattcaagtcctttgctcatttttgaattgcattgtttgtttttgttgttgttattaggggttttctaaatgttctggatagtaatcccttatcagatatatgatttgcaaatattttctcccattctgtgggttggctgtttactctgatattatcttttgatgcacaatttaaaaaatgtgtatatagtccaattttgtcatgaagattttgccctatgctttcttttacgagttttatagtttcagatcttacatgtaggtctttggtccctaatgagttaatttttgtatatggtgtttggtaagggttcaacttattcttttctctatggatatctagtttttcggcatcatttgatgaaaagacggtcttttctcctaataaatggtcaaaataaaaaccatttaactggccgggcgtggtggttcatgcctgtaatcccagcactttgggaggctgaggcaggtggatcaccttgaggtcaggaatttgagaccaatctggccaacatggtgaaaccccatctctactaaaaatacaaaaattagctgggcatggtggtgagtgcctgtaatcccagctactcgggaggctgaggcaggagaatagcttgaacctgggaggcagaggttgcagtgagccaagatcatgccactgcactccagcctggtgacagagcaaaactccatctcggggggaaaaaaaacaaccatttgaccatatgtgtgagggtttatttctgggttctctattctataacattggtctatctatctgtctctatgatagcaccacactgttttgattactgtagctttgttcaactatgtattttaaagcaaatttcggacaccatgtcatatcacccctacatatttcaaagcacatctcttaaaaatatgcatgtgctctcatctaaccacaatttgacacatgctttatctctccaccttttttttttttacttcgtgaaagtattttaaatataattctttttctttttctttttttttttgagacggagtcagcctcttttgcccaggctagagtgcagcggcacgatctcggctcaaatgcaacctccgccttccaggttcaagcaattattctgcttcagcctcccaagtagctgggattaccatgcctggttaatttttgtattttcagtagagacggggttttgccatgttgaccaggctagccttgaactcctgacctcaagtgatctgcctgccttggcctctcaaagtgctaagattacaggcatgagccactgtgcccagccttttaaagagaattctttaagcacaattatcaaaatgtaattttttatggcacaggatccctgcatacaaatgtaacttttaaattaacatatttggttgatgaattaaatgaaaggatggccaacacaggaagctaacagatagtggaataacaagtactgattttaaaaaataaataaataataaaacagcaaactaagaatcttttctactagactaagatatcactgacatgtcagagtaaaaaaagttatggacacgagaaacatcagaatgtactgtaccttagaatgaaatctcacagaaaagaactctgtctaaaaacaaacgactcaggctggacacggtggctcaggcctataatcacagcactttgggatgcaaaggcgggtggattgcctgagaccaggacttcaagaccagcctggggagcatggcagaacctcatctctacacaacatattaatacaaaaattagctgggtgtggtagtatatgcctgtagtcccagccatttgggaggctaaggtaggaggatcccttgaacctgggaggtcaaggctgcagtgagctgtgatcatgccactacactccagcctgggtgacagagcaaggcctgtctcaagaaaaggaaggagggaacgaaggaaggaaggaaggaaggaaggaaggaaggaaggaaggaaggggaggggaggggaggggaggggaggggaggggggaggggagggggggagggggaaaaaaaaccaaatgactcaaaacagagatatcaagttgagacagagtaaagaaaagaggaaacagtggtgagcaatagacctttcaaaacacatagtgaaatctaacaggctaatacactgtataaaattgtgtagtataagcacacagtaagaatttatagctagaagaaagaatacaagagaaattcaaataatcagctgaaatgaagagtattaacttatctctgcaaaatttaggagttatgccacacgtgatggctcacgcctgtaatcctagcactttgggaggtcgaggcaggcggattgcttgagcccaagagtttgagaccagcctgggcaatatggtgaaaccccatctttacaaaagatacaaaaattagccggatgtggtggtgcatgcctgcagtcccagtaacagggaagctgaagcgggaggatcacccgagcctgggaggttgaggactatttgccgagattccaatatggatttgccttattgtaacagagacagatagatcagtggaagaaccaatcataaatataaattccagaagcataaaacacttaaatgtaaaatattaaatgataaaaatcaagaatgaagtatcggaccacacatacaacctagggatggagaaattatctaaaagaaaacaggaaacccacttgctctgcagatccagatagttaactaagcatttataaaagctttttatgtattatggatattcaaatctttatctgtattgcaaatattttttcccaaatttatttgtgtgtagactttaattatctcttgccaagaaatagcaataggcaaataaatttgggaaagaaatatttgcaatacagattaagagttaaatacccataatacacaaaaaataactctcacaaaacaaaagataacctaaaagacaaatggcagatgacctgtgcagcaaatcaccatggcacatgtttacctgtgtaacaaatctgcacatcatgcacatgtaccccgaacttaaaataaaagttgaagaaaaaaaagaaaaagaaaaatgataaagaatatgaatagaaaatccatagaagggcaaatcgaaatggctgagaaatagaaaagaactacttgaacacattcgcgatcaaggaaacacaacttcaaggaaataccacttaaggtaccatgaaatgtatttattagactgacaaaatttaaaacgtaacagcattattgacagagatgaaggagtgcggaatcgggtaaggtactttcatactttctggtggaaatgtaaattattatagttttttggaaggcaatctggtaacgacatcccttaaaatttaaaatacccggcctggcgtggtggctcacccctataatcccagcactttgggaggccgaggcgggcagatcacctgaggtcaggagttcaagaccagcctggccaacatggtgaaaccctgtctctattaaatacacaaaaatcagctgggcgcggtggtgtgtgcctgtaatcccagctactcgggaggctgaggcaggagaattgcttgagtcagggaggcggaggttgcagtgagccaagattgcgccattgcactccaacctgggcgacagagcaagattccgtctcaaaaaaaaaaaaaaaaaaaaaaggaaaatgaaaaatacccgtactatttagcccagcaatactactcctgggaatgtattttatcatttgtttaaacctagataaaacaatgtttgttatagctatatgtgacggctaaaaactaggaatatgagtatctctcaactttgaataagctacggtggatctacagcaaggaatacgtgaaatcatcaggaaaattaattagagtgggaccagctaaattgtagggatttccacaagatattgctcagtaaacaatgcaagatgcagaaaagtgtgtatgagagcaatgacaaaacatgaaggaatatatgtgtggtgtatatgtgtgcgtacatgtagaatagctagctagctagatgttgacagggttatgagcatagagaaatgtgtgaatgataccaagcccattgctcacatggagcaaggcaggaggatgggcagaaggagagggggatggcagaggagaagcaaacagaagagatgaaaaaaaactgcactaaaaaggagtccatgtgcataagatcttggttatgttaaattgtatcttgatgcataaaatatgaaatctgtatcttcccattggcagaaatgcccccaccatattgtcaagtgaaaaaagcaagtggcagtgtagtatgcttctatttataagtgatacgaattgggattttgaggctcacagtgcctcaaaggggttggaaggttggagcggcaatggaggaagagtcttcttgtcgttctgctgggggatgtgtctggagacaacactggtccagttaaggcaagggctgccttggtatgtgtgtaggttggggtaggtgtgggggtggtcattgtagacttcggggtacagctcaaagcagatgcctaaatcccactatctgagtcattccttcagtctgaacctgtggttccaagtctggttttatttttcccaaggatggaaggttctggaagactttgtctactaaatcatgtcatttgttaggcaaaacctctcccatcctggacaaaaggtggcaatacatatgaggtggcttcaacactctcatatttatactgagatatatttggctgcaaatgttattttaacgtcaagcacaatctgaggaagtacaagttttcatattagttttagagaagcacagagggtttcctatttcttaacttgtgatacagattgagtatcctttatttaaaatgcgtgggaccagaagtgttttggattttggatttttttttcagattttggaatatttgcattgtacttactggctgagcatccctaatctgaaaatctgaaatcccaaatctgatatgcttggtctcaatggtctctcgtgctcatgctttgagcatgtcatcagtgctcaaaatgtttcagacttcggagcatttcaggttttgaatttttggattagggatactcaacctgtatcagcaaatacaggcatgtgttgactaacaacagggatacgttttgagaaatgtgttgttagacgattttgttgagtgaacatcatagtgttcttacacaaacctagatagtataccctattacacacctaggctacagacctacacagcatgttactgtaatgaatactgccggccaggggtccccaacccctgggccgcagactggtaccagcccatggcctgttaggactgggccacataacaggaggtgagtggcaggcgagggagggagcattactgcctgagctccgccccctgtcagatcagcagtacattagagcatagagtacataggagcatgaaccctattgtgaactgcgtgtgcgagggatctaggctgtggctccttatgagaatctgactaatgtctgatgatctgaggtggagcagtttcatcctgaaaccatccatcctcccaccccgcaaatccatggaaaaaattgtcttccacgaaaccggtccctggtgccaaaaaggttgggtaccgctgctgtaggcaattgtaacacaacgggaagtatgtgtttatttatttatttttttaggacagggtctttctttgtcacccaggctggactgtagcggcgggatcttggctcaatgcagcctcaacctcccagactcaggtgatcctcccacctcagcctcccgaatagctgggaccacaggcatgcaccaccatgcccagctactttttcaattttttgtagagatcagttgttttttgcttttcctgacttatcacagacttttgtaaaatatttttaaaaataaaccatggaattaaagataatgttgggcatggttgctcatgtctgtaatctcagcactttgggaggctgaagtggacagatcgcttgggctaaggagttcaagaccagcctgggcaacatggagaaaccctatctctacccaaaaaaaaaaaaaaaaaaaaaaaaaaaaaaaagtagccaggcatggtggcatgtgcctgtaatcccagctaccagggagactgaggtgagaggatcacgagagcccaggtcaaggctgcagtgagctgagattgcgccactgcactccagcctaggcaatggaataagaacctatctcaaaaaaaaaaaaaaaaaaaaaaaaaagcaaaaaataagcccaggtattttagtattacagtcagcacacataaaatgactgtcaaattgcttagaaacttttataaagttgctaagactcaatttctgaacatatattatggcagtctttaacagtccaagaccacactttggaacaccagtgttataaaaaggacatatcaggattttggtttgacatttaatctgacaatcatttaactaatgagtttggttcatttattgttattggtatatttaggcctgtttctagaactcacatctatatgtcctctttccaacaccacagtgatagggcctccaattacactgtaatattatggatatttcttttttctttcctgtggtcctggcttatttccagtgaccaggcttaccaaatatttcttgctcatcttcccttcagttatctcctacagcacttcctaggtttgttgaagtattttacccaaaaatattaaaatgtgggcattcaagtggctagacataacattctaagttcaaagttcttttccttcagttcttaaaaaatgctgctgaaaaatccaaggcttattggatcagagctcttgaggttttgattctgttcattctctctggaagctttcagaatgttgtcttcgttcatcttaaattttactacccagtaatgaaaatgaaatgcactacattaaagagatgtatcaacataaaagtatctcataacactgaataaagcatgacaacatgtatctcattccttttacatcatgttcaaaaccatgcaaaacttaatagattacttgggggtgctgttatgtggcaaaattgtgaaggcaaggacaggataaattcaaaatttagggtagcagctctcttgatggggatgaagatgcagtaggagaagggtcccgaggggtggggtgtctgaagcactgtttgtttgtttgtttgttttgagaaggagtctcgatctgtagcccaggctggagtgcagtggcacgatctcggctcactgcaagctctgcctcctgggttcacgccattctcctgcctcagcctcccgagtagctgggactacaggcgcccgccaccacgcccggctaattttttgtatttttagtagagatggtgtttcaccgtgttagccaggatggtctcgatctcctgacctcgtgatgcacccgcctcggcctcccaaagtgctcggattacaggcgttgagccaccgcgcctggcctgaagcactgttaatatgctgtggtcggagccgggggtggaaacatgggtactccttactttttaaataccttacaaaatcttttgcatgtacctaacttcaggtaaaataatcccccttgtgatgaactcgccagcagcggttcataggtcaggatattgggaatggtggcagctggctgcaggtcttacaggagcggctgcagtggacagtcatagctcaatgggccagagaagaaccacgggttgagatgggaatggggtagttctaggtttgccctaaacctggggtgtccaatcttttggcttccctaggccacactggaatactgtcttgggcctcacatgaaatacactaacatcagctgatgagccaaaaaaaaaaaaaaaatcggccaggcttgttagcttacgcctgtaatcccagcactttgggaggctgaggcgggtgaatcacctgaggtcaggagtttgaaaccagcctgaccaacacggtgaaactccatctctactaaatacaaaaaattagccgggcatggtggtgcatgcctgtaatcccacctacttgggaggctgaggcaggagaattgcttgaacctgggaggcggagattgcagtgagacaagattgtgcaattgcactccagcctgggcaacaagagcaaaactccgtctcaagaaaaaaaaaaaatcacaaaaaatctcaatgttttaagaaagtttaagaatttgtgttgggcagctttcaaagccatcctgggtcgcatgtggcctgtgggccgtgggttggacaagcttgccctaagtgaaaaaacacatctaatcacctctggacccatcattataccccaccagggagccacgctgaggacagaatggagctgctctcagtcccccacagctcagcatttcctgacccagtctgaatactcagcctgaaagtgggcatggctggtgagaccctctctggtcaccactcccaaaatgtcttccacctccagatgtgttactgtaataacagactcagaatttcaccccctaagtccaacatgggtgcactctctaactttttgaggcctctgagactttacttcctccttccacatcctcgcaagagtcctgcccaatctctggttctctgggaacgaggactgattgtccctttcctgtagctttcattgatcagtctgccaggcacctgacaatgataacgctcatgaacttgttgaattgaatttcttatccgttgatttcctcccctaggtgacaacttttaattaattaccatcggctttctgtacctgaggcttctgtatccttggattcaaccgaggattgaaaataaaaaacaataaaaacaacacaataaaaatgcaaatatagaaacaatacagtgtaacaagtattacatagcctttatattgtatttgatattataagtcctctagagatgatttaaagaatacaggaagatatgcatagattatatccaaatctatacactacaccatatccatgtacacatacactacaccaaaatccacaacaccattttatgtttttgagacagtcttactctgtcacctcgcctggggtccagtggtgcgaacacggctcaccgcagtcttgaactcctgggctcaagcaatcctcccacctcagcctcctaagtagctgggaccacaggcgttcaccaccatgtgtgcctaattttttttagtgaaggggcggggcggggggggcgggtttcactatgttgcctaggctggtctcgaactcctggcctcaagcaattctcccgccttggcctctcaaagtgctgagattacatgggtgagccgctgtgcctgacccactatgccattttatatcagggacttgagtagtctcggattttggtatccgaggaggtcttggaaccaatcccctacagattctgagggatgactcttttcttaaagagtagcccaagaaggaggcacgtgaagagcaaaactgtgtccaggagagcttttatttgtacggaacagttttaaaaatacagaataaaatagctttatctctactattattcacaacatctggtccaaatattacatatttttaaaatacttaaacgtttaatgaagccatgttagaaaaacaatatgaaaattctttttaaaaactccataaaagaattacacatctcaaaaaacaaccccaccccaaataccctcggtaatcaaaataaaaataaaaaacaaacaaaaccccagaaaggtatatatagccaaagtcagtcacaaaaactcaaggaaaatataggcatccccactgttttaagaacagtcagaaatgtattaaggtgtcaaatgaagattgttactaacgaacaaaaaaggagagtcatttgaactgtcagtaagatggcaacgtggggaagggtgtcctaagtgcctggaaacacgcacagcaatgctaaggacatgggagggtagagtgatgctgaaacacagtcaacaccaaccagaaaggacgggaatgtctgtgaggctgctgaaaagagacccccaacgctaatgtgccttatgggtccatgggcagacgctgaacgctggcaaaaccgggtggccgttcttgcactactcgggttctgactgcaggaggggcagagggtggtcgatgtcctagtccctgtgtctaaaaagtcatgaggggacagagtacaacaggcagcacgttaagtccctgggctcttttccaaagccaagaggaggctccctggagaagcgagctttgcgaatgctcaggcccggagccgcacactaacgcggcgtgcagcaggtgtggctgggtgtgcacagctggcgtccagcgacagccatgccgggcctatgcctatagcgagtgtacaccccatgcacggccatcccccaggatgctgctgcttctctggccagatgggttctggaatgaggcttctgctactgctccatattcaccttcaatctggcctggccactcccatggcatccgtattactgaagatgagacttgccaactttaagttgctagtaccaatatttcagcagggatatgaatgaaagaaataacaacttagctcatggtcataaaatatacgtatgggtaaataaagtatacacacatactagagattcatcaatggagaaattctatcatcacatgacattgtcatgaaaattatatcattccctccctggaaaactgtgactattatcctgggtagaaatgttattttgctatatggaaatactgcaatattcatgcataaaccaagttgtcatcatgaaagtcggtattctacagcataaagcaaaacctctgtgcgaatttgttaccatgaaaacgggaaaccatcaggacccatgatgcttcattctggctggcatggttaaagccacttctcttgccttgatcaatcccaagaaactaaaagttagcatttgaaatcctcttgaggattctgaaagtaaatgtatctgtgaatctacatttaacttcctaatgagaatgaaaattgcttacaaagactagagtcacttcccattattctgtgaagcaggggtgggggccctccatcccccactgtgaatatggcatcacctcctgtccgtattcacgctgtctacatttcatgttgggattgcccacacaaatgctttctttcagggaccaggcaggtgacctgggaaggtggtgggtaggtggtctctgtggaaactggagactaaccggcctgcaaggacattcacatccaaaatattttacaacactctacaggcaaaacaaagtacggggtggtggttcaaagccccagcaacgcaggccaatgatgtgaatgggaagtgtcatgacacagaccgcgagtggccaccgtgtcccccaatatctccccttcaggtgtgtgcttaaacccaagaagcagatgaatacattctttttctttcaattacaaactttcattctgtagcatattttccagtaggagaaccacttcctaaaatggtgtgtgtgtgtgtgtgtgtgtgtgttacatgttcaagtttattagtcattaggggactccaatcactcaaggctgtgcagaaagtaccagattcagcaggggcatctagtcaggctgccctctttgctccccacctcctattcccttacccctcctcggacagaattattgggttggccacagtggaatcagaacaggaaactctcactccaacaggagttgaaagggtagggcttccttccctgtgtgaaggcctacagagggcaccccacatgttagcggggttgaatcctcctgatacaacccggcccaaggaggggcttcagaagggagtgggtttctggatgactagagcagacaccttgagtgttatgcagcggaagacgcccagtcaagctgaagagaaggtgcccctggatcaccaatggctttcaggcttttatttggatatttggtctttctgctcacctggagagctagaagattgcaaatctctgggatgtttagcagttttccccatttttcagagcagagaaactggagatgttgagcaaaatccaaacagaaggaactgagagcaactcattgcaggagggctgccagcctcaagagtgtcccaaggcaagagggatggaaaccgcgagccagtgtgcttctaaagtatgcatcaaagacacatttaaaaaaacatacaaaattagatgtaatttagcatctaagttctttacttaatctgcagtaagtttttggcaaaacaatgcagtggctccgaggtgttcttgccagaataaaccttgaagccccaaacttccaagagtgaagggggctacggtgacatggcaatgctgcaaagacagcgccgcagcactggagagctgagccagcctggggccgagggggacaggaatgcaccgtgtggacaccaggctgccaagaaccatgccctgccgctggagacaggagacaggcacccacgcagctgaccaaagctcgaccaggccaacggccaccgaagatgtgccacctcatgaagcgagggcactgcttcctatctcaggccttttccttcactgaaaaacttcaaaccaaaccaagaggagtcatttctcaggaagaatttagtgttattaattagaactctcttaagtgagagggagcctgttggctgcttttcttatcacctttggcaaccaccctcacctgtaaaatcaagatctaacggacgtgcgacatggcaacccacaggaagtctccttaagccaagacttgcaacagaagcccggcaagcgggacagaccggcggacagaccgttccacgtggcggctctgcgtgttacctgccccagcttcccttcttcacaaaacaaattcacgtgtaacttgacccatggtttctgggctccggtccagtagtcagttttgataaatagattaggcattacagtatttacactttcatggtatcaagcaatacaaaacacaaccacaacaatggttactggccttcaaaagccgttacaacaagcttccctgatggtgtccacagctttacaaatgctggttcttttcttgatggggggaagagtgggtgggggacaaggaatagggatgcaaggaaagagggtcacatggaaaacactgatttccaaaatctgctatagtcaataacattaaataggaataaaaccttgtaattatagacgcgcgcgacaataacatccacatgacggcagagccaagacgcccatcagcttgtgtgactggtgccttgggtggcactctatactcatcacaccggccaacagtgataaatgccagagagggtgtctcggccactagtgaaatgaaaagaggccagtgtgcacgtgctggcccggtcagggccagggtggccaagagaaggtgcagccgagaatcagatattggcttcagggtcctttccttttccctccaatgccccaaacagatgttcattcaacatctgtgcaggcctcacccatggccagatctgggcacaggggagccacgccactgttttcaggtcaacagcctcctcctccgggagatcagcgacaacagaatcatactgggccagtcagtcatgatagcgcaaggcatactagtgccccttggtcagaggaggtctccgcgggcacagacgagggtcaaatgacaaggaaacaggtccaggggcttcggagagagagagaaagcccctggaccctggaggtggcttataggaaagccagccctgggtggtggaagggaactgaagcaaggaatggctgcagattttaaatgtccactccaaagggaggactggaacttcaaatttagtgaccatggccagcaatggacactctcaaagggcaaggagttaagggcttaaataaggagataggcgagacaccgcatcaggcaccatcaccctcacagcagaaaagtgattcgcagtctgtcttagctctggggcgcagaatgtaaatgtagatatacaaacatgtattttacttcttgttactcagcaaggaactacagatacatgcctcactgcggccaggccacagggcacagcaaaggctatcccgtggcctgggagtcttcatctgaactccggctgttgtcgctcttcctgaggcctttccatgtgtagcccacaaaggttgggctgatgggtaagtagctgaagcatctgtatttttttataatgttcatgccaaatggcaaattgtacgactccatgccgtcgagtgatttgttccctttgcccacacccttcttccatttccggattcctctttcctctggagtgcctgtcacacatcccaagatagaacaaaggaatgcttcgtttagcagctctactgaaaatgaaactgtcgtcaaacacatacacacacacacacacacacacacacacacacacacacacacacacacacacatggtcccacagatcaaacctgcctagataacagcaaagaatacttgaggaggtgaaggtgctcagctatccagtgcccaaaccagaagtctaagaagcactaacccctccatgtcctcattcaagcaatcacctaatgaccttctgacctccctatccttctatgtgacccatattctcaattttcactgttagggcccagctcaggccatgttattgctttcctggttcattctatcggtctcccatctggttacctagtcttctggctcatcacctcctgccccaggtctgctcaaaaactacctctctaggccaggtgtggtggctcacacctgtaatccaagcactttgggaggccgaggtgagaggatcacatgaagtcaggagttcgagaccagcctagccaacatggtgaaatcccgtccccactcaaaatacaaaaattagctgggcgtggtggtgcatgcctgtaatcttaactactcaggaggctgagacaggagaattgcttgaacccgagaggcagagactgcagtgagctgagatcatgccattgcactctagcctgggcaacagagcaagactctgtcttaaaaacaaaacaaaacaaaacaaaacaaacaacaaaacacacaaaacaaactctgtaaaatgtaaatctgagtcaaaaaaaaacctctttaaaatgcaaatctgagtttgcaaaacagggctgaatctttattgtatcacacaatgccttcatcaaccagtcactgcacattcacccccccatctagacagacccacacttcatgctgctttgctccattttagcgtgtctggtgctatgggggacacacaggtcatgtacctgttgtgcttctgcggggatgaacatccaccggttggacactcctggccactctgcaccctgacagatgggtcagggaggaagctctgagcacacagggctcagcaaggaagctcatgacttttttttatatctaagctctgctctctcatcagtatttcagaaataaagctgactttaatttccatcagcctgactgttgcatccctctctcaattccctctggcttaggagagaaagagagtagtcgttatggactcttaaatccagtgccttccatctatttgtgtgtgtgattccttctgccttggtttccccagcaatctcttgattgaggttttttattttttttggagatgggttgtttaaaggggaaaatctcaacaaaacctttgagcctaagaataagtatcacccttccttgaaggcagggaaatctgccagtatgtccatggcagcactttacagtggcccacagcagccaccgccaaggcaggacccacataacatcctagtctgtcatcccaagctcagcacagaatgtatccataaacagggatcatgggtattggagaggcagctgcctccaggcatctcttgtcaatgatcctggacccctgatctcagcctttgcccatggtcttctactgccttctggtcttagttggctggaagcccaccttaggaacaactcatttaagggacagtctccccaagcagaagtgccacgggctgtgcccacctctctcagatcagatgaaacccacactgcagggcctttggcacaggctgtgcagggggacaggagcctggcctgtgcccatcccactgccatctcaccaaacgcagcgaactcagctgctgtctcccaaaagtccttcagcacgagaaacaaaattaatcagtttatgtagcaaaaaactgattcatacatggaggctgggagtgccatcacaactgttttagaaaacagttataaccagtgatggctttgaactcatttactcttcccgttttccatttctatttggcaaaaaaagtaacacatatgttaaaaaataaaaaaaaaaaaagtgtgtttgatatataccacgtacctgggatggtgttatccaggataaaagccacacagccccctacaaacatagcagttgtgagaaggacgttcaacacttgatcgattcctgttatccctagaaagagaacacagccataaacgatcagtgccacagcagcggtgagcctgcccttgacttgggaaggggcaatggtgtgggcagaactccgccaatcaaagcaggaaaggaaagtgtacatttcttagttgtgcacatgtagatgaatttttgccagtaatgttttaaactacgatgaatactttcaacaataatccaaaggtatctccataaggagaattcccaacagtggtgcatagaagatgaatctaagagtggtgttcaccctacaacgaactgtgaagccacaggggtgtagtcggtggataaaaaaaattctaaataaaaaaaaatggtagtcataaggctgagaaaaaattacaaagtgaataataagatgacaaaaatatttctggcacctgcagtcatagaagacttttcagtatcctgggttatcaattagtgcttagctgcttttaatcaggggcaactggatttataaagatgtcctcccatgaatatgacatattaaatgtaaaaaacagcaagaatctcatttatccacacactttccatccggaagatagaataatcctcaacagaaaatcataggcactggtgaggatgtggagaaacagaaaccctcgtacatggctaatgggatagtaaaatggtgcagccgccatgaaaaagtttggcagttcctcaaaaggttaaaaatagaattaccacatgacccaattattccactcttaggtatatacccaggagaaatgaaaacaagtactcaaatatggcccacattgattattcatgaattacgtgtttgtgaaattgcccatacactaaaatgtatttgtaaacccaaaatgaatacccttggtgccttcatgggtatacagagcagtgaaaaatctgagccacgccacatacattcctgactgatgtcaaataagctgacgctctgccttgttctggcctcatcctgtaaacaagagtcctttttgcggactatgtagtgccatgtctgtcataccgtgtgctttccgttggtgatctcactgtttaaaatgtccaagtggtgtgaagtgctccctgacgtttctacacataaggcggctatggtgtgtgttaaagaagatccatccaggcatgagctgtggcattgctgactgtctttccccagcaatggttcagtatttgctaatactgcttgtggcaactctacgaaacataacttcatgaataatgagaactgattgtacttgcacatcaatattcacaatagccaaagggcggaaacaacccaaatgtccatcaatggatgaatcgataaacaatttatggtatatacacacaaaggaacattatctagtcataaaaaaggaatgaggctgggcacagtggctcacgcctgtaatcccaacactttgggaggccaatgcaggtggatcacttgaggtcaggagttcaagactagcctggccaacatggtgaaaccccgtctctactaaaaatacaaaaattgaccgggtgtggtggtgggtgcctattatcccagctacttgggaggctgaggcaggagaatcgcttgaacccaggaggcggaggttgcagtgagctgagatcatgcccaggcctgcactccagcctgagcgacaaagcaagactccatctcaaaaaaaggaatgaagtactgctacatgctacaacatggatgaatcttgaaaacatgctaagtgaaggaagccagatacaaaaagccacatattatgactctatttatacctagaatagaccgtgaatccatagaaacagaaagcacaccggtggctgccagcgggtgggagcaggcggtgatggggatttactgcttaatgagtttggggttttattttggggtaatgaaatgttttggaaactggacagaggtgatggctgcacaacactgtactagatgccattgaactgcttaaagtagttaattttgttatgtgaatttcacccacaaaaaatatatgtataaacaaacactcctcaattctgcactggctaagatattaccagtagcaatggctatgtcttgagacggttcttcctttctacattcctcaggacattgcagtgttaaaacaaaaggaggagttaaaaaggttaatcttgaatgcacaagccacgtgattttgctctgaggagttaataggatagacatcaaatagtagaataacgtgttcaaagtctatgaagttgagtttcaaaaaaaaattatcttaatggagcattagtctattaagatagactaatgaaatcaaaagcatttagagagaggcattctcccaaaggagagggtcccagtgaaaaagagaccttagcatccatgactgttatgtgtacacgccagcaggaagcccacagcgcttccaggtaagtattgaaaagtgagattcaagagagatccacagacgcatctgcaccacagctcctggaggcccaaagtcctctccaatgggcaaagagctgcgtgtggactggcggctgtggttccagctcccactccaagatgtaaagcccatttcctcacctgtgaccagagggttctgtctgaggtaacttggaaggacgagcccaaagaagatcgaaaatccaagcacaaagaggttccgggaagaatttaaatcaatgaactgcaggttagagaggccaacagctgtgatcattcctggagaaaaacaaaccagaccacaagctccagcaccactacagcggggacagctcaaggcaggtgagggcaggctccctggcaccccttctctgtccaacagaaaccaatgagaccagtgcagggacaggaagggggacgtgtggggtcagactgtagccaccctgcgctctgagccaaatgaccctcggcgtacgcgctatttgggctcctacgggagcataaacaccatgtggcattttgtttgtcaaatagaaaactaaggacattggttctctctctacacaaacattttgattaaacagggagacctacctaaatatctggtgcatgtctctggttattacagctaaatggtgcagagatcaaacccagagtcccactgtcaaaatggtcagttttaagtagcccattcagagggatggtatttgagttaaattggtcagaaatactaaagagattaaatttaattgaaatgttcatagcacaattacatcttattgttggttccatatttaatataaattcaactcagagagtgataaaagttttcattttttgaaggcatatcctttgtattttaaaatagaaatttatcgttaccttcttactgaagggagtcagcaaaaacaccatgacccctattaaaaatttggaaaagtaaaggaaaaagccagagaggggagtcttaccaaagagcgtgcagaacagggctcccagcacaggatccggaagggacgcaaagagggcgctgaacttcccgatcatgcccagagcgagcatgagggctgctccgcactgtatcacgcggcggctgccgacctgcagaacacacaggagactgggaaacagggactcatctccatgcaaaatcaccgtaagttactaaagaacacacagcagagatacccatggcctggctcgctaccttcacctcctcctcagcccactcttctcacctccactgtggggaccctgagggccgccctctgcatctccaagccttggtgacactccctgcactcaggcctcagggctctactgccctggcacagtcatgggttgggatggccgtctgtgtctcaaatgcaaaggccacactttgcccctgcctatcccctgggttcccggcaccacatgtcaccaaggcaatttcccccaaagtgcttcagcctcaatgccaacttccccacaccggaaatcagaccaaacccccagacatgtctggaacctcctctcctcacggcacgcttcccgtgagaggtggaaaagagaaggggctacggatgaggacatctggagcctgactgcgggctcttctcctggcccacgtctgactgtatggtcgggccgacccgtagcctctagagtctcaggatcttcatctcagtcacacacaagcctcgtggttttgttttgaggattaaacgggacctgcataaaactgcctgaatggtagctggcacgcactgagccatctgagagccgcccacatgggcctgctgccactggcctttcctgcacccattccatggggccacggggtcacctttctaacacatgaaattggggaggctggtcccctgcttgcatcctctggtactcatgaaataaagcccacttctcaggctctttccaagcacaccaggcaggcctgggcctgtctacctggacacccttccctgtggttccctcctagccagatcctagatgcatccttttaaacatcacccaaatgctcctctgaaaagcatcccaactccaggactattcccccattataggctctcatagcaccatgtagggcatatctgctactcctgatctctgcctcccagcagcttctgtctagcctgctgtcaccagtcatgggttgggatggccctctgtgtctcaacgcaaaggccacactttgcccctgcctatcccctgggttcccggcaccacacgtgagaggtggtgctggcatcaggctcaggaatcctgcactatgggcccctactctgtgctgcctcttgcaggaaaacaccctaaggatgtaaactgggtaaaggaggttccagagtgtttgggggagtatccacaaggatttatgtatgaccccagtgaggagaagagggttgcttcaattttaattaagtaaaatgagacaaaattttaaacgcaattcctcacgtacaccggccacatctcaagtgcccaccaggcacacgtggctggtgcagctgtgtgtgacatgttgaccactgcacagaaccctcaaaggaccagggtcagccagttacgcatcagagcctgatctgaggctgtgcacatgagagatggctgcccagctggactcagtcactgtctcactgtccctagcctgccccacaccacagacggcagggaagcaatggaaaagatcactcaaactgacaaatcaagcaaaagcgactcatgcttggctgttactatggaataaggaaggctttcatttactaatggccctatcttcagcaaacattttcgaggaactatgtaattatttgatcaagcttgtgacttgttagactgggacaggtgaatgcaaagatgaataagtcacaagcttgatcaaataatctcactgctatgctgttctgctgttgggggagcccagcagcagggaagagaaaatctgaagagttggggagggttgttggagatggtcctgaggggtgagtaagagttcgctagtggaagagcatccaggcagaggaaacagcctatgcaaagactcctggcagggtcgggcaggcctgttaggtatgaagggccaaactggccccagggatacctgaaactaaatctggtagcaaagtgacatccagaagactgatctgcctttgatgctgtcaacaatatatgcagcaactaagccattcttgtgttcaatgaatattgaccaagtacctattatgttttattctaactaccagagatagagccctaaaatcccagccttcccggtgcttccccaggacctttgcttcccctctcacagggtccattccctggaatctccttggcacctccctcctgaactgtggctctgcctctaggaccttggtaaaatagaccctgggtttctggatttacaaagtcttcaacggtggtgcagaatgcagcaaggagaaatgaccttcctctggacaccaacaaagagatctgacggccagcgagatagtacttgctctgttcctagaaataaactaaggggtaaatagcaataatgataataacgataatgatggaccttgctggtccaggtagggaggcactcaggtgccatcattccttcatgcaatatagatatttatgaagcacccgctctgccaggctactgttctaggcacttgggatacatcagctcattaaaaagtgctggcaaggtaacttgtcagagtaagctagcaccattcaaattttaataaaaggaatgatttcccaaactaccttggtggccacattatatgatgatgtgttttaaaggggtgcagaaggaggaggcttgttacaccatcttcccctaagattcccttcatctacaacaattttactcctacagtcgtccctagggaaccttgaattagttccaggaccgccactctccccgcctcagataccaacaaccacagacgcttaactccctgatataaaatggtgtagtatttgcatgtagcctacacacatcctccaatatactttattttatttatatatttttttttattttttattttggagtcagagtctcgctctgtcacccaggctggagtgcagtggcatgatctcagctcactgcaacctctgcgtcctgggttcaagtgactctcctgcctcagcttcccaagtggctgggactatgggcaccagccaccaagcctggctaatttttgtgtttttagtggagacaggggttcaacatgttggccaggctggtctcgaactcctgacctcaggtgatctgcccacctcggcctcccaaactgctgggattacaggtgtgagccaccgtacccagccaatatcctcccatatactttaaatcatctcgacattacttacaatccttaatacaatgtaattgctctgtaaatcgttgtcagactgcattgttcagagaataatgacaacaaaaagtttgtacatgctcacccagaacagtacagaaacaaacaatattagttcagaaacaatatttttgaattgaagttggtagaacccacagatacagagggccggctatcttatttgagatttgggattagttatatgcctgcaagctcatggcagcaaactggctgaagagtggcatggcttaggccccattctgtgcccatgagatccttccctcatctccctgtgctcagcactggcttctcaccatgggtagcaaaaggacctccaggatggcgctagaggaagcgcccctcagacaaccttccctcacatcccccatacagggagcaacaggcagatggggccattggcacacctcaggctgagctctggcagggccctgccaacctggggaaaccaacaaacaaaccaggcatgtgtgtgcctgcctggcagctccctctcacctggatttgcaatcaaggttaatcaaacttagtatctggtttctctttatctgattatagaatcttacatggcaaaggagagctcttttgaaatccactcctccctcccaatttgacagaggtcaaccagttctagaaggtttccgggctcaccccaagtcctcagtgagggagacctgtgagacgtaggccatcgaggatggtgaaccaattttcatggtcttagtttcacaacataccatggccaatggtgggtcatctcttaatttaaaactagtgacacctcccagttgggatcccatttctaccttttgcccagccccccatggtctattctcatcactgcagtcaaagcgatccctaaaaaaaaaaaaaaaaaaaaaaaaatctgaccaagctgctccctgcagcactcccttccactcaggcagtctgtggctgcctacctacctgcctgcctgtgtaacctgctccccagttacccggcagaccccacctgctctgactccctgacccgcactggcctccttgctgaccttccacttccaggatagggctcggccctggccacaccctggcctggaacgctctcccccaggttatttgcaggctccctccctccacccttcaggtctgtgttcaggtcacctgatcaccctctccccaagcttcctgtcccatgtttcccccagtacttgtcactggctgacataatgcatcatttatggacttagtatgctgattgttgattgctagaatgtaaactccactttttaattcactgatgtatcccaagtgccttgaacagtggcctggcagagtcagtgctttataaatatctatactgcatgatggaatgacagcactgagtgcctccctacccggaccagcaagagaagagagacttccaaacaggcattataaacacttaaaaaaaaaaaaaaaaaaaaaaaggagagaagtaattttttagaaccagaggcccgcccatttggaacttgcagtggccagatcgatcaatgaaatggaccaatgcttagaaacccaatcatttaattagaaaaatctgtgtacctttgtaattcccaaaactccaatgttgggactggatgaagtagagccattcccagtaccaaatatgccatcaagaacacaggagaggccttccacgaaaattcccctaagatgtaaaggaatggaggaaagaaaatcattcaatgggataatgcattcactctgaaatagcctctacacatctacaatccaaaaatgtggtccagagcctgcagcttccacatctcctgggagctgggagggcgattaaaaatacaatctcagaccccaccccagacctgctgaagcagaaaagaatctgcattttttttttttttttttttttttttagagagtgtctcactccgtcacctaggctggaatgcagtgacgcgatcttggctcactgcaacctccacctcctgggttcaagagattctcctgcctcccgagtagctgggattacaggtttgcaccaccatgcctggctaatttttgtatttttagtagagacggggtttcaccatgtggccaggctggtgtggaattcctgacctcagggtgatccgcctgcctcagcctcccaaaatgttgggattacaggcgtgagccactgtgcccggccagaatctgcattttaacagaacccccaaagctcattccattttgagaagcacatctctaaatcacacgttagatttgagtgtttttaaatcaccgcaaatgaaagcaaaggattttagccagaaaataaagccatttgttggggtataagacaaacatgggccgtctatggaaataaaacattgatgtgatcctttactcttaaaatccagtttcatcaggaaggaaatgttttataatttcataagtactgacacttttaaacatactgatatacaggtatttaatcatgtgcagcagctccattagagaaagatggggacatcaggtaccagagccaaggcccagtccattaatctcatcacacacagtcccttctggggttacagagctggctggagaacaggaggggatctgggctgttttcttttctctgcagactcctcaggggcaatcatctgacaacttctaaaagctaatcataaaccccatagttcataagccctagatcccacagatttcattcatttctgctattcctgtccctatttatataaactgtaactgtgcatagattacacagtgcttacccttggggacaattggaacgtatctaattgacagacctggggcatactgcctgctgctaaggtttccactacaggggagagcaaacggtatccttgtgctttctgtctgtccgattgtggcagccaagattgggtggggaaacagggaaaaaaacaggtaatttttgcaatgtagaaatagcactgtatagccaagtatggtggtgcacacctgcagtctcagctactcaaggtgctgaggtgggaggattgcttgagcccaggagttcaagagtgtggtgcattacgattgtgcctctgaatagccactgcactgtagcctgggcaacacggtgagaccctgggtctttttaaattaaaaacaaacaaacaaaaaaaaaacaaaaaaaacctgtaagcagtgaagagcttgttttgctgggaagaaaaatttcagtttgtgtaaaaaaaaaaaaaaaaagaacagttggaaaggcaagataacagaaaatcaaagtagtgctctctatctctctctctctctctatatatatatatagacagagctactttgattttatctatctaatctccaaatgacacacacacacacacacaccccaaaaaaagcaaagaacaagtgcagtgcttggcatgtggtttttgaatttaaggcttacagtggtttcgcagagagtgtgttatttgatgtcactgcaattaaggaagggtaggaattccgttccacgtcatggacgaggaaaatgaaagtaaacaaaggcagtggtgtatcagacagtcgaaagtaaacaaaggtggtgatgcatcaaacagtcgctagagtcctgctgcttggctgggctcctgctgaaactcttggttttgtcttcaaggtaatgtaaacctaagaacaaagtaacaaggtgctgggaccaatcaggaacttgtcttctcaggaacgtacctgtttattgcgtggatgggggggggtggggcacaggacagccgtgcacaggcgtagtagtcaccaatagactcgatgatgctggcgaccacggcactgagcatgccgatgacaccggccgcagacacggtgggcagtccccactgaactgtgggaggaaaacaaccatgaatgctcctagagaggcaggcgaaagtgaccaggaccagttacccaaagtcattctgaacgctgcaagactctacaagatccacttggattctgaagctcatggaaactgttcattttaaaatcttaagcaccagatgcctgggacagttgctaagtcagatgaaggcggccataatgaggactgatgtgcactgtgtctttaattaaaagaaaacatcgtagccggatgcggtggctcacgcctgtaatcccagcactttgggaggccgaggcaggcagatcacgaggtcaggagttcgagaccagcctggccaacaaggtgaaaccccatctctactaaaaatacaaaaattagccaggcgtgggggcatgtgcctgtaattccaactactcgggaggctgaggcaggagaatcacttgaacctaggaggcggaggttgcagtgagccaagactgcgccactgcactccagcctgggtgatagagcgagactccatctcaaaaaaaaaaaagaagaaaaagaagaagacattgttgggctggaagaggctgtaacttctctttcctgcttccaagccacactcagtatccactaaataacaactgaaagtgccctgccacgttgggaaatttgtatgagggatttatagccctgctgtacagagcagggtacaaagcagcagtggccttccccaggggaggacatcaagtgaaaaggcagtgagaaatcaccagctaaacttaaatcccaacagtaaagcatccataaggtatggacagtccttctctactataataccagaaccttatttttatatcataaaccatgttatgggaaattaaatagtttcatttcagaaagcaaagtgaggccccactgaaacttcattttaagttccgcatttacttaatccctcattagatacttttttcttcacaagtatatttatttggacttgaaagccataggtcttacttaacaaaaatagcatgggtctctttcgtgtgagaatgaatagactcctttgataaaggagtagcccttcttccgttgaagcattagttataatacactcactgagcagaaagcacagtgggaaaagaacgatggctaaaacatggtctctcatgcaggagccaacaacgtagctggggacacaggacactccaaaagatccagggagagggaaattgctcaacttcaaatggaggcaagctgagctgggtcacaagaagcaccagtgaggtggtcaggaaaaggcgaagtcgggccctggccagggaaggatctgaggaggaggtgggaacggaggtgcccctccagggatcgggagggtctggagggtggggtttgagggtgttctggtgaacgcagagctctcatgcagggcacagggcaggaggcaagttctggaagtgttccaaaagccatctaagccacctagaggggtttggcctgtgttgtaggtagcctagagcaaccactggattgggaagagaaaggatacaaagtcagacgtgcagaataagcctggagtgcggttaagggcagaattgctcctgcctcaggcttgttcattctgtgggagcagccaggggatgcagaggcggcccttggtcaggggtgcaaggtacgcaggttgatggatggggctcgacacaccctatgccaccagcaagaggcctgctcaacgtatcagctccaggttaatttggaatggattttcctcattcagaggccttcctcaccaaggaacattttgctttttctcaattatcttttatactgttatcttgttattgttgtagcattctggtttcaagaattctggttgtagcattcaagtttagtgtcttgattttgaagggggattcttattttgatcctttttccttcagatatatatctatatatctatatctatatttttttttcttaaagaccttgttggcttccagccttctctcttgaatctgttatttcatatctccttttaccaagaaactttcatttagtttgttacttgacagcagggtttttcaacctcagcactgttgacattttgcaccagaaatctgtattatattaacaatcagtccagaccatgcctagtgtactaaagactgaaaagcactgctcaggtattcaaaagcccctctctggcttgagacaaagcactggagagtactacatatgtatacagtagtacgactatatccctggaggtggctttctagctatggagctctggtaccccaccagccctcggcaggccaggagccctacgtgctcgctcacggccagcacaacctcaggcgctctgtctactaagtttcgccttctcgtgtgtggccccatgggtcctagtgaactccctctggccccagcacctgtacagctgcctctcctggacagcccagcttgtgcccctactggcgcccaccttgggagttgcctgcacaagcagaagaccaccttgtatacgctgtgggggcttctacctacctgccacccccgcctcgccctcaccctgactgcctcaccaactaattgtaatttcattttatctcagactacaggtatgtttatgaaccatgcacattctttcttggaaaaagaataggtctgtataaatgcacacttagaccatacaatctgatgagaaagttattttagaaagatgaaacttttttttttgagacagtcttgctctgtctcccaggctgaagtgcagtggcgcaatctcgactcactgcaacctccgcctcccagatccaagcgattctcctgcctcagcctcccgagtagctggaattacagacacccgtcatcaggcctggctcatttttgtatttttgtagagatggggtttcaccatgttggccaggctggtcttgaactcctgacctcgggtgatcctcctgcctcggcctccccaaagtgctggggttacaggcatgtcccgccgcgcccggcctgaaagacgaaactttttaaagctttcctaagtgtattgagaacaaaaagaacagccaacactcatcattcaacatgctcagagcagtcatctttaacccaaccttaaaattcttggcttctctctttttctccttgtcattataaaaaatgaaaataagatggttacacagggaaagaagtgggctgaacctgactaagctcaggctccaattctaataaaaacccagacgccgggactagagtcttcacaatggaaccaagtgtgtaacaaccactgggatcacctacacggggccagctgcgagtccaggtgacaccccagctagggaatgtattcacacccccaacagttacacaacactcaaattaagatgcagcttttggccattagtgactatcaacttacctctacagctgtggccaaatttaaaagattatggctgcccattaagagattatataaattccatcatgcttgagcaggttgcttgctaatccccaggctgttcccactcacatctttccactttggcagctctgggaccaagcagctctatacttgcctatctaagcagctgccctcaaatcctggccaccagagcttaaacctggcaagagaccccttgtccaggatttcatcctagcagatccaaaagagacagctcgctaatgtgagaagggagccggtcagtctctgtgtgttggtttctgccctctggggacagggcctcccttacttgctgtctaatcctctcctgaccagaatggcaaggccttcaggagacagtctgggacaaagacggctgttctgccaaattcccacccctctcagttgggccctcgtgggctcttgacccctctagccatcagaatacttacatgggtatggaaccttaaaccacggggctaccagaagcacgccttgcctggcatctgtgcgagcatagaagccatactttgtgctgtcgggagggaagacatctgtcaccgtgaagatgaagcagagcagccaggataccaggatggccaggatgatctggagtggtcaaggggaagctctgtcaggccagcagggctcacaggtgttggcaaaaaacacgtcttcccgcggtcggaatatcacaccccagagcccaccacagtcagtactttgcagaccttccttgaatggactctcactgagagagcagtttcattcaggtgaacttatcttacccattccaaagtctggctggtaaaacaagaatggacatcgtgcctgcagaggccacgtggagtcaaatcttactcagtcccaaggacagtgtccccttccttcggcactgctaaaaggatgtgctcccatttcagaatcagaatgtttaagtctatgatgatctgagtggtcattagtagcctggtctcactgcacagatatgatcccccaaggagggcctgcttaaaaccctcccttcacttaatcatcttacatattaaccaagggcaaaaatgtcagcaggggaagaagtcagctactcacagggaacattttgaacagctgtaacttgtacgcagtccatcctttcttggatttataaatcgggagaggaaatttaacatttctggcgtattgagaaaacagtaatactaggaatattgtcctgaggagagaaagaaaacaaactaggtcaaaagctgttatgtctctgttataaaataacactcgaagcttctatggcaaaattgacatagtgttcaattcatttacctagaaagctgctagtcctctgaactaccatttgagaaatagtatatctattggaatgtacatcttttggaaatactactgtgggggaagatgttacaactaatttgcctagcatttcttgatactgaaatgaaattctgatgtaaatgccttaggacagcttttcctaaatagaataagaaaacccaaagaatgtacacattgatgggaaacgcttactctatgtaaagggaaaggatgccagatacaacataaactgtaagattataactatgaattaactacaaagcaaaccaagaaactactgcacgtacacacaaacaggtaagaaggacatgatccaaaattctcccagggattcgctttgagtagttacatgatttgcaactggttttcccacttttctgtattttccaatctacttacagcacgcataaattacttttaaaagagcaaaaagtaagcttcactgctcaagaaaagtagatacagtagaattcagtattaataacattcctgggaggcttctgtgtgccagacattacactaatgtcttcctgtgcagcatctcaaccttacggggtggcttctaagatggtctccttttcacagagacaaagccagaggtccaagatcacacggctagggttgtagcactggggaccaggaatctagctctatggcttgaactgaactctttccttttgccaccctggtcacagggcaaggaggctgggctgcgtaagtccctctccttgagcctcacggtcctgactgaactgcactaagtgctatgggaggcaggtgctgacccctccacggcaggaccatggcacttcctgacacaccagtccatgacatcggtctggtgtcccacggggctggcaggtgtggggccacttcccatcccccaggtggatttttactcatcaccgaaacaaaactcgtgcccaacaatgcgtctaagcctccacgcggtctcgctctttcacttacaacctgaggtagagctggcaggaagagtaggttctcagtcaaagctaagcttaattgttcctgggcacagttccaattgttgagatggaatcattagccccatcgacagccggtcaagtgtgactccactgtcacattcctaatgaggtgtggatggcagcccggctggagaacatgcgtgtgttgctccacgggtctccctgcctactcaggcgcttcggtgaactggtgatccatcaggggtctctgccagtaccagttcaaggtcgaaaacacacacagtgcccacgttatttcaattcctctgggatagtgaagtttaacaaaaaacaatatggtaacaagggatactaaaactggaatattttaaacttagacctacatgcaattttcatgtctggaaaaaataaatgctacttatttgtttcagagtgaatattaggagatccaaagatgccccaggcctgctagttttgtcatcattatttcaggcaacacacctgcacatttaagaggggactgagaccacacagaatttgaggagggacacccagatcttaggcccaaatctggcaactcaaatttagaaagcagattaggtagcagatgaacatgactgtttctttctgctctaaaacctctctacttcgagtttatttttattctcaaatacacctgggggcaggcaccctgtgacagagaggcagcagcttagaggtgcagacccgcccatgtccacacatcttaactgagcaaagggatgaagcgttctagccccagctctcaggatgggctgctgtctactccactgggtgcttcccacctcatgtttacctttgctaacttttactttaaaatgttacgcaagtaatacatactaaattgtacaaaaaatttaaaagacagataagcagaaagaaaaagataaaaccctgaagatcatccataatcccccttgagtgataaaaccatgtaatatcgtggtctatctgttctgaacagttttcactccctggatatttgctgggtgctggaggaagacagattgtcatcttccttgtccccagacatgaacaggttattatctaagccaaactggaatcatgctttacgcagcttcctgacctgcctcagtatctatttgcttttccgcctcatcagacagagatttgcagcagcaccttagtgactgcttagcattctgttttatggacataccaggggacgggggagggatagcattaggagatatacctaatgtaaatgacgagttaatgggtgcagcacaccaacatggcacatgtatacatatgtaacaaacctgcatgttgtgcacatgtaccctagaacttaaagtataataaaatataaataaataaataaataaataaaaattcccatactgtatgacatcagaagcaacataaacagctttaattgaaaaactgtatcatcattgcttctaatactcagtcttttcacgttgaggtatatatttcagcattttttttggtagcagcaaaaatttaagctacatgcatgagcatcagctgagaaatggctgaatacattatagactacattactaaacactgtgcagctttagaaagaaagagatcatctaaacatgctgtctcagagaagtaaacccaacaaattattggggtaaaaatgaataaaattatgtatatatactagtttgtacttatttgcataaaaatataaaaatatgtaaggataaaaacaaaattttttactagttaacaatcatgagatttttttgagagatggagtaggaggggactattattttgctttagatttctgagcttaattactgttaaatttcaaatacctagaatttaactgaattggagggagctgaaaaacagtgggatatagataaaagtatactgttttggagtgcctggtattgacacatgggggttcattaaactattctcttcacttctgaataggtttgaaattttccataagaaaagtcaataaaaaaataagttttaaaatgtaggtcctaccaaggacgtatgcactgtgccagaaagagcagtcactgaccggccgcactaaccttccctgagactccgtctctaaactccatctccatcagagtgacttagtttgtacaacctcattcactctcaattccaacagaatcatgtagataatacacattttaataaattgggaggataaacctttttcacactttaatgagctaggtgtagtcccttttttgccaaatggctactcctatcacacccttcatctattactccactgggattctctcacttttaaattaaccagtagaactctttacgagttagggatgttagcctttcttgtgacatttttatgagtattttcccagctttttttttgagacagagtctcattctgtcgcccagactggagtgcagtggtgcaatctcagctcattgcaacctccacctcgtgggttcaagtgattcatgtgcctcagcttcctgagtagctgagattacaggtgcccgccactacacccagctaattttgtatttttaatagggatggagtttcaccatgttggccaggctggttgagaactcctgagctcaagtgatctgcccaccttggcctcctaaagtgctgagattacaggtgtgagctgccacgacagatttgtttttaattcagtggtttctgacgttttaaatgtgtcaatagtaaaatctatctttctctttctcttttcaatatctgctttaagaaagatctcccctcccttaggattaaaaacttatttaggttttcttctagcacttttatggttattttgtatatttaagtctttaattcaactgaaatacaatttgatataaattaggagtctaactttttcccaaaaataattagtttttcctacataatttgtccattccccactggtttcaaatatgactgccatctatactaaatatttatttttctttgattctgtttctgttcttcttactctgctctgccaatgtctacccctgtcccaggaccacagtattatttatgaagttgtggaatgtatttaattcctctacaggcaagtcaccatcccctctcctctctgatctttttggtatgggtccacattattttactttcttgttttataaattgactagcacatctagaataactttaaatgatacccgtgataataaacaagcttatttaagttcctgacttcaaaaggcaggactgatttgagtctttcatcattcaagtaggaggcatgtttatcttacgcataaagatccttctatacagccaggcacggtggctcacgcctgtaatcccagcactttgggaggctgaggtgggtggatcacctgaggtcaggagtttgagaccagtctggccaacatggtgaaaccctgtctctactaaaaatacaaaaaaattagtcgggagtggtggcggatgcctgtaatcccagcgacttgggaggctgaggcaggagcattgctggcagccgggaggtggtggttgcagtaagcgagattgccccactgcactccagcctgggcaaccagagtaaaactctgtctcaaaaaaaaaaaaaaaaaaaaaaaaatcctcctattctcacattgctaagtttgcaacaaggatgtaggttgaattttaaaaataaaattcaggggaagggactattaccatagttttatcaataagaccttattaataaaatctaccctgtagtcccaggtactcttgggaggctgacgaatgagaatcgcctgaactcaggagtcagaggccacagtgagctgagattgtgccactgcactccagcctgggtgatggagcgggatcctgtctcaaaatttaacaaataaaaaaaaacctaccatggagccatgatcgatttcaacacattttctaatatttgatcatctgtgaattcttgaaatgacgcattatgccttgttctttcattgtgttatctgtagcagcatcttcccaaacaacattctaaggaatagtctgtcaagatatgcttatagatgtgtgacatttaaaaaacaaattaagggtggacagggctggatactaaggcccttttctgaaggtgaatagagtcttttgcgcatttgcattttgaaagattggaaggagtcttacagtagagaatgatgctgaactttagcacgctacctgaagacatttgaactcagggctcgttgcttagaatgtgccgcaatacatccatcagctcaggatttgtttgttttttaacacaaccccaggaaagaaaacaatggtccatggttctccttttgtattagttcagtcagaatttgccgctaagattggctggggagtttccctcctttcacagagctctggaacagtttgcaagttagtgcatatagtctctgttccttgaagactgaatgcactcattgtctaaccatctgggcccagggcttcttttaggaatcagagtccttcagcaactatctcggctgctcttgtggtcatgggtttaccgggcttcctgagccttcctttattagttcacaacctgctcactgagcaccagctcagccacgggaggggcaggtgctgggggtgcagaggtgacccacccagagcgtaggccctgctctcacagagctgacagcccaaggatacagaagagctcttggaaactgaaaaaacaccagagcataaatgacaatcttggcagaaggaataagagataaagcaaaggagaattctcacgaatagagaaaaaagacaaagagatagaaaacaggagaggaaacaggaagagtccaggaggcttcaggaagaggttccagaaagagacaagtaagggtggagtggaggaaggcatctagataattcaagatcatgtcccacctctgcatgcctgggtgctcagagcaaaggggctccaggtatccaggccaagagacgcaagcagacccaccgagggcagcacgtgaggctccagacattggaacagtaagaaaaccccaaagcttccagaattctagcttgtgtctaactgatgtttcaaaaggaggggagagaggaggacccctgggagacatgagggagaagctggggacagtgaggaatcaatggccaagggcgagcaaggctcgcagagggtggcggcagtgaaggcctgcaaaagagaacgggttcagaatttgttccggaggaggaagggcaggatgggctgtgtgggggatgaggcgaaaggaagactgaagaacagatagacatttctggctgaagcaactaggggcacggttgtgccattcaccgaaaggaggaaagcagaagaaactggtttcaggggcaggaaaggaatcaaaagtctggggctttttcatttacagatggagatgtcttgtgtaacagtaagtggaggggcaaaataggggctggatctgtaagtatcgagtttacaggtctgaactacaggtttccatggaactatccaccatcaaagaaatgcgatttccttgggggaagtgcatggagagaagggggccaggatcaagtgtggaggcacccccatacttagagataagagtgaggaggagtcaattttggttacttaagttttctgaaaaccactattttcttactttttgttttaatttggggggaggtaacagttttgctccctctgacgggatctgtggcagatctatgtgcacaggcttcctcttatcctgcttagctttgccagaagtttgtctacattgggttttgtttccccctcaagagatcagcttttagatttaccacttctatttgtgtcacattttctgtatctttattaattcgttccccctgcttttactaggttcatttttttgtcctgttttcttagttactgaaattcttcatgtgctgtatctgctttaaaggttgtgaattttcttgagaacacctctggctactaagtgtgactggtgctgttcttgccatcatttcctaaactatcagtaattaattgcaaagtttcaatttcctctctgagagtgatttttaacacttttttttttaagcttgtaagtgctttgtgggttttgttcatccttttgttactggtttcaaattttactgtactatacctacaatttatccattttggcattaattacatttcgctgaaagactattctcacatgccatcttcccatctctgctggtgtgaagaatgttttgaccaacctttggtgaaatgagaatagtaagaacaattttgggctgggcacggtggctcatgcctgtaatcccagcatttcgggaggccaaggtgggcagatcacctgaagtcaggagtttgagaccagcctggccaacatggtgaaaccgtctctactaaaaatacaaaaactagccgggtgtggtggtgggtgcttgtaatcccagctactcgggaggctgaggcaggagaattgcttaaactcgggaggtggaggttgcagtgagccaagatcgcaccactgcactccagcctgggcaacagagcgagactccattgcaaaaaaagaacaattttgggaaagcatgatgatgggtattcatgctcatgtgtgagatgtgtctccttcaaaccttgtttaaagaaaaaaaaaaacttgatattttcacacaccttaatttaatttgtaaagtgtagataacaattctgctatggttcccttttatttgtacgtcatgttctaatacacagaacaggattgagtatgatgggttcgggcccatgtccaccacctgggttttgaaacccacggtggccacttaattcactgtatgactctgggcaaatcacattacgtcgtggtgctcagtgtcctctgctgttaaatgggataacactaggatgtgccttatctgatactatatacaagtgttatataaaggactgatgcatagtaaaagatcaataaataccacctgttattaaataactgcagactatttcacaaaacagagcaaatgaaaaattctcttatgtgatgacttattttgttttaggagttgtactggctggttaaattccagagtaatggaaccatatacctacacataatcaactcttaaacatgctctgcagacacatagagaatgtgggctctgtgttacaaagagttctgtgactctaatcatcagtaatattatcaaactcccctgtgacttcattaacacaaaatgttaactttacttaaagggcaagggacatctttaatggatgtgacattctgtacaaaaggacaggcactgactagcaggaccctggcagaaactatgtccctcccccaaccacccacccgtcaggagtgcagagctcagtgtggcctggggagaagagtcacatcatcaatggcaacagacctttcccacgacttctctggaaatactccagattcctgccactctggaatatttttgagtctcatgatataaaaatttggcttctcagtatgtcaactcatgaacatgagacttggcaagacctcaaaagtcaaaaacaaatggcgccactaccttaccccactaccaaagcttaaaaacttacaatccaccctcttcatattgctgctaagtctgtctttgtaatacgtcaactatatgtcacttcccaaactctgggtcaaaaacccttcaactattccccagcacgaagcaaataaagttgaaactgtcagaccattcttattattgaaaaacattatctcctgaagtctgtgtgaatgttcctaaaggctgccccgcagtggtgggatgaggggagatgtttccacttacagcatggcaatgccccagtgcttcccggctctctcccccgctgcctggaaaccagagaggccaattagggccaccgtgggtgtaatggtcaagggaccgatgtacttcagtagagccccaggcaggccgaggaggccgatgactacttctatcagtgaggacatgatgatggccccctggatctgcaacaagagatggcacagacatgagagtgagctgcttgtacactgcacactcagaatgtcacctacaaccacaactgataattctgcaaggcaataagttattacatcatctaacttgggagagatagctagaaaattccccaggacccgacaagaaacttcagggggcactaactggggcctgcattcatgatgcaggtgtattacagaaataggtcctggacacacggcccacatgcctttttcactgttaaacgatgcaggcaaaaatttataattcccttttaagaaacacaacatttaaagaccagccttagaggaacactgcagcataaagactctcagctttaaagagtgagccccccaggacatcgacaagacaatgttgttgacagaaattctaaagggatgtttttagtgtgcagaatggccacatctgtgctcattctgaactgatggtgaattatctcacacgttttggaaaatattaatacactgtcagccgtacttcatgtctgcttctgttcaattgcactttggcagacaaatatctttagttctttcaatgaacacaggcaaacactgaggccagagcgaacaattctgctatctgtcgatgatgagcctctgtagctccatccagtgagccacgaacctcagctagctgtgctggcgggtgtgagtggacaggtctgtgggtgtgcaggagggaggaaaccattccttaaggttgcccagagcatttccatatgctttattttagagtattgcttaactacatttacttaaacaagagaaataaactatcagtaattgaaaaagaaaagaagggctcagtaaaagtaactgctatttcttgggtcaaccaacattgaagctgagaagaaacatgaagaagccaaaagcagacaacgcttgtcttttacctctcggatccggggataccagatgtgttctgtgtgcaacagctctgctgttccattggcaactgaaacatcttgaaaacaaaaacaaagtttttcttggagtgacactgatgtctcacatgacatattcattttaccttttaagaagaattttctccctgtttttattacatctgtttcaatccccatccctaaaattcaacctccaacagtatagcttatctcactgaaaggtggatcctcaaatgctaatttaaccaaatgaattcatcgactaagagctccccaaattgtcaaaagctaactgaagtggtgatacacgttactagcaccagcctcacacaaaaaaaccaacctttgcacacagctcattgaaatgcccgacagcaaggttgctggactgaggtttgaaaaacttagataaaacagagggccttttccagttcccagatcaaatcagtggtcacaaagtaactcctaggagcaaggaaggaaatgaaggctggaaaactttgctcctagaaggtcaaaatgtaattgtatttttgagagtacaggtctgactctaattttcttaaattccctatcttttcctgaccttatcgggttccttaaggatctttgcaatcactaaagaaggggaatgaaagtcatttgcagcaaaccacagtagccagatccttaaaaagcaaagatgtttcagagaagggatgctgacgcagcaaagagagtgattactggtgggtcataaaatccactgaaagagagaggcagaaaaatagcacaaatatttttctattccgttcccatatttgtcaatttcattaacatagagaaatgaggtcaattctgatcctttcttgctctagggttagggatgaacaagtggacagaaagagagagacagacacgatccacagatggagcattctaagctgtttgtgggtttgtgtgctttgtccctaattcttgaaaggatttagcgctgctgagggcagcacgtccaggcctccctttacacctgcattaaaggaccccaatgacatatgtggaaataactgcaattacctgtggtgttacatttccatttatctaaagacaggatggctcgagcaggggccaaaaatgcaaaagcactggcctgaaacaggggtaacctaaaagaaacgagaccaaaaccatgatcacggcatcgggaactaccgaggtagttcactatttgacagcttaacagtcttttccatagacatacagcacatgagtaaatgcaggcacacctagaagaaaaagccccagtttgcaaaggtttcctgtgccatgcagccacagccagtggcttcttcatcctccccattgccactctcctcccacccaggcagctccagggtgggccccgtggtcagtgccaacaccccaacaccggcccctgccatcaccacctttcctcttgcaggcgggagactgcgggcatttgaggttccctctttcctgctgagcttataaactcctttttaaacatcagtgtatttctgcttttttacctccctcctcctccctttaaaattcttattggttatcacaggaacaaatttccctccgttgtttcattttgtaaatcaaaaactgccctaatcaccgattacagataaatcataatagtgatctagatctacagagctgtaagttacaacgtgacagcagataaaataaatattctgcttaatcataaaaatacttaaagacattctaatatattttaaagggcccagaaaacttgcagaatctccattaaatttgctgcccacatcctcaaactaaatgcagagatcctcaaatgacatgatttgattatattttagatacttcatattgacttcatgaacactttagctattcaaaaagactaccattttttaatggaaatgtacagcatttcagctaagtcacattaaagtgactttatgggttagcatgagaacttaatcactatttttaatataattttgagggtaaaatattaaactgactcctcctgtttgcagggctgggaactctcacacatccaaatcctgaaatgccccagagagcctagtcagtggcctggccagcgagacagggacccagcatccttccctttgagctgtctggcagcaagtcctacccacagtgaaacaggaactggactgagaaatcaaactggctctagctaaaggacaagcagtctcgttgcaagtccagagcccagcacacaccattctgagccagtgaggtcaagacttccttgttacagatgctctcctggctgtttaatcatgcaatgacatcaatccagagtaggaagggtgctggctttaaggcacagacgcaggctacaccatacaaaccagatgcattgctgttgaccactcccacaggcatgcccttcaacaaccatccagttataattacctgccagaggggcccagaggatagcggaagtgaaggacacctgaagtgggaatgtacgtcaaagggaaaacactgtttgacttctaggtattccataagcacaaattttcaggactgtactgaaaggacagcgtgtaattagggacggatgctgtatggaatggtccaaatgccatctggtttaccatggtttcagacttcaaccagtgcatcctagggcagtggaatacaaatggtgaattgcgtttagagattttatccttaggaatgtggccatcacacatcacactgtgttggtgatccactggaaatggcaaaaggaaagactggatctggcttccactcttcagtcagacctcagcctgaacctgaccttggcatccgacctgggcacctttcagggtgagcatttggtggcttaactaggactaaaggtcccgagagcgctgctgtaaagatacttgctcatttgcaagctgctgggaccctgagttcccctgaaatagatgacgatagaaaaagtctcccgagatgatctggaaagggctgctcatgccagcattatgtgttcacgtctagccaggcaacaccgcctgacacaagctgttaagacgccagcactaagtgtgggctctgtcactggcttgactgaaacgttcttagggaaagttgcaacaagagcatatgcacacgttaaacgagagcttccctagatcacaattaacaaagccaattttccaagaaaacggctgaaggtgatgagagtggcttttttaggtgcttgcccagtgtgaagacggtcaattctcagctcttctctctgcacccaaggcacggcccctgtcgtactcatgtgaccaggtaaacctcaggcacccaggtgggtctccctaggccgagaagactgcctgctcttttattttgtactaaagactggaaaggaaatacattaaactgtgcttttctttacaccaggggcggccaaaccagccagtgggccaaacctggggtgctacctgttctgtaagtaaagttgtactggaacaaaggacagccatttatttactcacggtctaaggctgctttcacgctatcacggtggagctcagcagcattaacagagacacgcaaagcctaggctatttactgttggccttttacaaaagaagtttttctgacctgtctacagggaaaatatatcttaaatatgtgaagaggcagtgggtttctgcagctagaaattctcacagttaatagtggtcactagacattagtttaaaaaacaaaatcctgagcagaccagcaactttgacatgacgagatcccatgtcgggctccagcctcaggacagcaggagaacctaagcaaactcccacagtccttactttattcaaaaccctgccagaggccccccatgtccagcttggtgcccaggtaacctgaaccccactcccagcctggtatctctcaccagctccttcatacgagttcatctttcatttgtcatttaaggcacagagaaaatatcacctcctccagcaaatattccaggatctcctttgaatctgtaatgtgttcccctacaacttaggactttttgtcaagatttctgcaagtcacctcccaagttaccaggaagctgcttcaggattctctgggagtgctggttaaatgtggagatttctgcatctcgtcctggttagccagattcaggggtgggtggcaccaaatctgcattttcaacaatgccttctagaggtggctgagactgacaacccctgtgccaggttaagggatttatcattttgtcacctgataaatgattcttggatatctgcttgacaccagcacaattataagcagatacgacgatggaaaacacttcctgagcccttctgtttctgctgcgtgaagaagacactaatcatggtcacatataaggggccgtgatgtgacggtgtgaaatgctgtgggactctgcaggtgcagtcgcttgagcgagtcttaaagaacgagaagtgcttcgccacgtgtgtgggggattatgggtattccgggcagagagaggggaggtgcaaaacaagagccacaggacggacccaggaaccctcagaggactgcagattctccacttgagcgaaagcacagggagctcatatgatgaaggtcagtggggaccagatgacaaatgccccgcattcttcctgcagcaagagggaaatgagtgaaggacctgctctgaaaggaccaccgtaggagaactgggagaggtgaccttaaccctgaagctattctcagtcttgaaggaaccaagccacagaggacatcccaataggctgtggcatggctctgtgtgtcatctttgctttttaattccctttggcatccgctcacatgacgagccagcctgaatcagatctccgcctgtgtccagcctctatctgctcccttcctcgggctgctgctgtctgtgctggtgcactccccacaagctgtcctgcccatctcaaccttgaggcgggcatcccccgatactaggaagtggactggcttcacccaccatcttgacccaccatgtatcctcagcaccaatgaatacttaatgaaatgaaggagctatttatattctcagaaaggacttctattaaactaaaaataagaggttaagtctttgtggcaagttggttttgactgcacatttggaagagagtggtgattagattaaaagtactcagagttgggggtgaaatgtgcatgggttttcatgattcaaccagataagcctccagatgccgggcggcttgcagtcctcctctggtgccatcagagaaactttaaaagccaatggttcctatgggaaacaccatgaagatacaaaatgtatctgcccagaactaaactgttaatgaaaatgaataaaacaaaaacaaaattcaccaacacagagcatatatactctgtgcctggcttccttcatctaccaagacaacaaccaaagttggtacaaaaccctgcattgtcaaatgaacactcaagagtctaaactgcaggaaaaatttttgaaaaataatccttaagagatgtaacaggtttggctttgaggagccataggttctttattgaatctaccactaggagtgtgtgtaccaactacttttaaagaaaagcaaggccaggcgtggtggctcatgcctgtaatcccagtacttcgggaggccaaggcaggaggataacctgaggtcatgagttcgagaccagcctggccaacatggagaaaccccatctctactaaaaacacaaaaactagccaggcatggtggcaggtacctatatcccagctacttgggaggctgaggcagaggaatctcttgaacccggaaggtggaggttgcaagtgagcctagatcacaccactgcactccagtctgggcaacagagcgagactccatctcaaaaaaaaaagaaagacataatgtgtcaaagaaaactttttcttaattgatgacatgttctatcatttactgtatccatccatccatccatccatcgacctgctgaacttttggaaagcagcctgcactgttctatctattcgtggtgatggtgatgtgattgtacacatgggtataagctcatctaactatacagcttaagggtgaattctgctgcatatctattgcccctcgacagagctgacattttaaaaacctatgtctatcaatctaacaagtgttttcagggagtggggacttaggaggatgggggtagcagaggcagggagatgacaacacattccttaaaacaccagagtcatgccaaatattgaaaaaactccccaaatttaaaacaggaaaagagcttccatccttatttggtgataagtactgttcactcctgtgtagagctgcttttgccagggcagtcacctgcctaaaaaggaagaatgggggttaggggaggggaggtaggggaagcagaaggccatgaggaggaggatgagcaattcagagcccagggaaatgtttggggcaagaaggacctgacagttgaagaagaaaggttgtagaaaaccaaattcattaaactttcatgtaacaagaggactcaatcagactcccaggcccttgaaacatcacaaataccagctaacagaggaagggtggagtaactgaagggagaccacccagaaaagctagagttgcaggaacaaaagcgagtagacccgccttagagaacaagcttggctgaggcaagagggtctccggcctcaggaggggctggatcaaatgcccttacagctttctgatggcctctgccatagattccagggtcagtggggcccaccctggctggggacactggcagtgtggccaaccccaagccctgctacactcatcaggtctgcgttgctacacaaggctgtccagcccttgctcgctgtgcacccgctgcactacctgcctccttccctcccagtggggaaaactaagataaacagagtcagccactgagtgtggacaggtaccaggcatcagctcacctgatgctcgctaacaatctttcttttgagacagggtatcgctctgtcactcaggctggagtgtagtggcgcaaatcacagctcactgtagccttgacctcctgggcttaagcaattctcccacctcagcctcccgagaagctgggaccacaggtgtgcaccaccacacctggctaatttttttttatgtttttgtagagacaaggtctccttatgttgcccaggctggtcttgaacttcggggctcaagtgatcctcccactttggcctcccaaagtgctgggaatgcaggcatgagccatggtgtcctgctcactaacagtcttatggttagtttaccattgaggaaacagggcttggagagagcttgtccaaagtcacgtgactattaaatgatggaaagggagcccagccgcctctgcatccaaggactcagtgcagctggcagtggggacagggcagagacccttagccaaggtcatcacctccacgttctcactggtctaccttatctcggctcactgcaacctctgcctctcgggttcaagggattgtccttgcctcagcctcccgagtacctgggatataggcacccaccaccatgcccagctaatttctgtacttttagtagagatgaggtttcaccatgttggccaagctgatctccaactcctgacctcaggtgatccgcccgcctcagcctcccaaagtgctgggattacaggcatgagccaccgtgcccagcctggtctcccatattaatgtatgattttaaattcctttttagttaagtggatggtaacaaatttttttatttgggcacaaaaccctataatctgccattatgtgcctgcttgacatgacaaaatacaaaggatttgacatcacctacacagtaattttggcaacaatgtttaccctaaatcaaccatgcctccagccccatcttctggttgacaacaaatcagagggattgtgggacaaatcaaacaatatgacagggacacaatcaagacaaaatcagacacgagacaccaggtctggaatctttttaaaaagatgatgacgtggggaggaaaaaggtggagacagcaaagagacacaacaaacaaatgcaccacacgaaggagactggtttagagagggaataatggggaaaggtattttaggaacaactgggaagttaaatacgaactgcatatgagatgatgaaacagaatgattgttaatgttcttaggtgtgacaaatggtctcctgtgatacacaagagacaccgtcattgctaggagagtatgtaggggtgagccatcatgctatctgcaactttactttttttttttttagacaggatctcgctctgtctcccaggctggaatgcagtggcgtgatcatggctcagtgaagcctcatctcctgggctcaagcgaccctcccacttcagcctctcaagtagctgggaccacaggtgcacgccaccacacccagctaattatttttattatttgtagagacaaggtctcactatgttgtccaggctggtctcaaactcctgggcttaagcaatcctcccgcctcagactcccaaagtgctgggattacagccctgaaccgccttgctcagcctgcaactttactttcaagtggctcaaaaatcaaaaaaattacacttgtaccccaacatacatatacagaaagagaagtggggtctctcccttgccccaatctgatcaccgcatccctccatgcttctaagttttataaacaatcatgagttcgaagtccccagatttaagaccttcaagtctcctggagccaccccttgtactcaatgagcacatatcatggacaaggttccattacgggccccaggaacctgacaggatagaagacagaggaactctctctccttagggcagacaatctggttagaggccaggttcctaaaccagctacaatgactctcttggccaaaccctaccttttctcagcacatgaacatgctgtgtgcctacagcaggcctgagaacggccaggagggctctctcagagggggcatcctacctttcattttgctggagaggtcagagtgatgcttctaagaggggcctggagtgaaaggctgagggtggccccacagatgccgtaagactctcctcccaccagcctgcgggaaagtcagtgtggtgacggcggggcagggtcttggagggccctagagacaccaagggtcaggggtgggaactctgggaagctcagaggtgccacaaaagaatgacggctgcaggctggctaggggactctcaaaaccctgacctgatttctctggattttaaaggctttgtactaattcccggaacaagggttagctggaattgacatcacagaccaaccagaatgagaactgttgaaacctcgctcaggggaaaactcggtaatgaagacctccttgacacaaagctcaggggatcaaggtcaaaggagaggagggaggaggaaaaggtagggaggaagagggagagggagagggaatgccatgaggaagggccgtgaggaagctgcctttccctaagcaaaggcttggaaagcaccaaagcctcctaaagtcctcaacaactggggctaaggcccacaacctccaatgcaaaaagacaacggcccctggaagaaaaggaaaactttcatgccaggggagagatgtgcagtgaaggaagaagggtctgcagcctgcacaactcagacatgcttcacgtggtctcagccagtcagccttgggaaatgtacccccatgctgtggcatctacaatcggcctcctgttcttactctgctcaaactgcttcccaagccagcagggaggggaaccatgctgcctgctgacctgggtagttctatttaggtcttgtgacacaacagtgggcaaggtgatgccctctgtgaccaaaagtatttaccccaagttcccccaggccctccctttcgtctgcaaagacacacatctgtttcactgtgtcttctgcaaagacacacatctgtttcactgtgtcttctgcaaagacacacatctgtttcaccttcatgggtttcccatcaactctgatcatttttatagaatgaaacaggtttccaggatagcattccactcagatcaagagcccatgtgaaatgagggggacgacttgaccacagcaccttgttccttcctgtaatctagacacttctgcacaatagagggcccacccctcaagggcacaggccatggtttgtcctcaggctcccttcacccacaacatccagcgtgacagaaatactgggtactcagcaagaggcagtcaaatgcacaatgcaggatacagaaccgaaacacaacaggggaaccacttcggagctggagaagtctgacactgtgtcttagaaatcacgaaagctggacacgaaaaacttttccttctgctgccctaagcctaaggaaatgagtggtgagcttctccaaagcaaaaacacaacccaaaaaagcccacagaggccatctgccatccttccggcagtgctgctgggagtcaggcctgcacgcccggctgcatctgcctttcctctccaccttgctccctgctcacagtctctctaccccaactgcagaaaataaacacagaagtctaaaagaaatgataattcacagcctatgatggatctatctaagcaactagcagaactaaaagtctaaaatatgagttcacattttcatatgcaaaaactcccaaaaagtattttaggaaacataataatctacaaaaacacaatagattcattaaaattaggcgaaatatatcattcccaggacacctgagggagaagccttctttcattttcacaaaggaaacggggctcgaggggtcacttgtccaaggtcataatgccacatgctgtaaacatatctctatcctcagaaatgtaggtttgatacccaaggggttagaattccataaaagtatcccaaaatctgactttcacttgcaatggccatgcgtccagctctggcagtattgatcttggtgagcacccctagaacagatgctgtcctgagtgagatctgggtgtccaagtaccagagggggcctcaccctactgaggtctggctgccaaccttgctctgctggatgggaacagcgcatatgctcacggaggagttggccatttggggatttctgctcttccctcactaaccccacaggaaacctgaggcaaggctgtgagaggtggtgcggctgacaaggtagcctggcctcgtctggcctagcgcaaagatgggaacaggaagggtggaggagtctgcatcccaacaggaagggatggagggtggagagacgtgggggggatgagagaagaggagacacacgaacatggggtgcagcaaacgtgccccccacggtgactggccagtcaaggggggaaccagcggcctctctcgttgcctcagtgccccttcgctgcctcagacacgcagccccctgcacagcaggcccccaagtgtgctaaggacccacacggaagaaggtctgcagacagggtctgaggccgtgcggagcaggagcccccaccggagccccagctcactgcccacctgctggtcggagaggaagcaaggggtgcaggcaacacacagcactgcaggctcagattcacagcaaaagcccccctcagcctgggaggcccagactgcccacaaggtgctggcaggggcgctcccctcccccatcccaaaggctctctctaagccgctccactggaaagattctttaatcaggacacatgaagcacattccattccgtgctgcttctctttccagctaaggattcaaagcaggaagggacccccaggacgagaaagagtgagactggggaatgagttcagtcctagcacagtcaccttcctatcccacacccctgaggcttgcctaggcccccatcacctttctcatggatgtcactgatcccctgggatggtcctcaccccctatactaagtaaccaagtaacgtccttcaaggcacagccccgggggcgagtcccctgctaacaaagccattgaatgctccctgtgcctgttgataagtcccaagctctggcctctgtgtgcctgggcagggggatcatgccaggctgtgacttcctgcctttgctcctgcccctgctgggatggaagctgctccctcagccctcctgggcagagcccttggagcctgcagggcctgtctcaaacaccacctcctccagggctcccaccaagtcccctggaggatgcactgtgtctccctgatggcgctgcccttcgtgctgcaagccatgtgcttcgatgtcaccattgcgccccacaatggccaggccccgcacctgccacatagaccagtcactgaatatctgcagggctgagccagtactctttctctttgcccaggttaagagaacgggcaccacccacaccccgacaaccatagaaaacccctatcacaagcccaacaccccaccaaagtccccagcacacctgcacctgcccagcagcacacagttgctgacgtgattagagtcagcaccacctgatttatgactaagcaaatggccacactgtggggaggatggaagcaggggtggggctgccattccttgcacagccaaaggtcatgggggactcactctgactcctcacaaacacagcaagaaaggctgctttcacccagccttgtgggcatggggcgcacagacacgcaccctcctccaggccacagctctgcattttgggtccctgagccatcccagtagggtgtcaaatccctctcctgttcttactccgctcaaactgcttcccaggccagcagggaggtgaaccacgctgacccaggtagttctgtttaggtcttgtgccccaacagtgggcaagatgatgccctctgtgaccaaaagtatttaccccaagttcccccaggccctcccttctgtgtcccattagcaactttgcccatcaggctcagctgctggccaggcctggcctccttggcatgagctggggcagagctgcacacggtacacacttcactgcaataaacacagctttcatcccctattcaggtcaaccaataatgctcagctagagacactgaccaaattcacagagggattatgcctacaaatccacggataagtcagcggtttagaaaaagaacatctccccagagaaccagtgctccatgggcaaggtaaggatcctgagtgagccaaaaaaagctctgccgtgcactctggacttgaagcacagagccctgaacactgtacccaaagaatgaaagagggtgctagtcaggttgagcccttcttggaaggcccagaccacatctccttcccctagtcggtcagtgatatccctgccctgccccctggggggtttgaggagaccctcctcccttcagcccagcttggtggttgtgggcagactagcaagggctgggatctgggaaccatcagagcttgccagccccaaagcctttagtccacatagcttctttccatcagcagacctgcagcctaccctcccagggtgtggcctatcctggcaaccagaacacctgcacatggctcaccgccctccaaggctcccctatccccgtgccgcgttagggcaaccctgaggtcccgaaggattctgactcatcagaatgcagtccctgacttcagctcacacccacctcccaccgcagggagggccaggccttactcagcctgtctctgacagagcaagagacagctggccgtgaacttaggacagtcctgccagagcaggctccacttcctgagcagtgccctggggtaaagcaagaggctgcactgcgaagaggggagaggagcaggaaaggagaggaaaagacaagcttgcaggaggaggtaggaaggtagataaggatgtttctcttccttcctgtgccagctccacgtccatttaagctggtggctggaaatgcagaagtgaacaagccaaagccctggcatcaaggaggaagcaccgtgggaaaaagacatagaaacaaaaaggacaaactggaataaaggccacactggaaggatgaaaacaaggtgggaattcagagaacaatgaagggctccacagagtcgggagggcaggacaagctgggcctggaggatgagctgttgtgtgccaggcgggttgagggaagacacacaagaaggtagacagcgggcccttgggagtgaggccagggaaggcaggagacagggctcagaggcatggctggagatggaagtggggcagagagcaagggcaagcctaaatgctgggtgcagcctggtgtgtaaaaagggaggagagctgcagtgtggctcaccctgaggagggtgtggaagtagaaagatggcactgggtgtggggcacaaagtgagtccaagagcagtgccctggaggcagggaagccaacggggagcctggtgggacactctggtctgaacgtaaggaataggggcacagaggggtgctggggagcgagcatgacttgccaagggggcaggggaaggagagtgaggctgagtttccagcttggacaactgggtaggggaaggtggcggtggtgccattcaccaagagaggaaatgactgggaggaacactgaggggtggggaccaacggccactaggacattcccgtgcctccattctgtccttgccaacagccctaggcaaacggcgcagctcaatgccttctgcgctcaatgccttctgggggctttggcatcccccattagtaccccaatctcacctgcatccaaacgttgtctgtagcaaagtagtgattcccacacagaagaaaatggtcccaatgagctggctggtggcccactggtcgtaccccacacacatggcatcggccaacaggaagggcactgcgatcgtgccgctgaagcatgtcaggtagtgctgtgggcaggaaaagggtcagaggagaaacagtaaacccttcctcatttattcttgatttcatcctaattcttctctcttattgtcgttaaaaaatagcccacataaagaatctccttggtttttcgaccaagccatacttttttccttctttttcagtatttctcctttgttgttaagacagtttcactcccattgccctcgacggagtgcaatggtgcgatcttggctcactgtgacctccacctcccaggctcaagcaattctcctgcttcaacctcccaaatagctgggattacaggggcgcaccaccacgcccagcttatttttgtattttttgtagcgatgggttttcaccgtgttggcaaagctggtgtcaaacacctgggctcaagcgatccgcctgcctctccctctccaaagtgctgggattacaggcgtgagccaccacgcccagctgcatttctccttttcattacattttattgtcttactattcactgtcattattacttattacttggatgaatccatgcctcacaaaggaaacagtcaatatcagcactggtgatattttacttatgtaattcttattagaaatatttgggtttcttccccaaaatgcttttctggcataaattgctaaaaccataaggcctttctcctctaatctgttatcatgaattgtgatgtgctgaactattcttgcatgcttgaaacaaaccctagttagtcatactgtatttttcttctgggatttgatttgctaatattttatacagaattttgcatctacatttctaggttaattagtctatttctttaaaaaagttctttcatgtctggggattaaagttacataagcttcataagttacatacgcatggagtgttttctgtctttttctgtgagctggcattgttttcgaaaacaaagaattcgtctgttccagtcagggcagggttaagggcgtacagtagccatgggaatcttccagaaagaaccccatcccactttcctttgggagtccccccaaccccccgccacacctgtagccctggtaggatagtcccagcactcacgactcacttccctcccttcccctgttgaccagttcttatttctgttctgcaaacttcctacttttcttccagcagcttcccattcctgcccacgttagccaaacatgccacatgcagcccatgaagcccgactgtaaaggagtttcctggggtgaaatactcctgttcaggatgtctcagggctgctcacaactttatgtactctgaatcgtcaggaagggcatgatgcaggcagggtttcccactcctatctgaccagggaagactgctgggaacatttataagataaacattccaaaaagtgtccttcctgaatctggttcagaatgctcagcccaaggtagactagttgccgaggccactcagctccttttgctctgactcctcccctactcaacagacacctgccagtcggggttaccatgggctgtgatacctgaaacggggtgagggaagggcggggcaactggaaactcaaccaaagtacccagctgttggcagccccaccccagggtgaatcaacctctctggacaatgagatggattttctcggcacctgagataccttaggttgaactgaccacacaaacttgagaagggaaaaatgctaagtccgacctcagaacagagtccaagttaaaaccaaagcatattcagtccaggagtgtgcatttaagaaaagaccctccccacgttgtcccctttctccaaaacgtcccgcgttcatcctatgaaagggaaaagggtgctgaagacagaggagggaagtatcaaagacgccggaggcctccatcagctatgtcaccacccaccttgtccctgagcccggctgccctcccctcccactggaagctgcagcagacaaagctgctgctaccatggcaagtttcccttcctttaaaaaataagactgaaaacctaccatttaggtcctggccaacatggcacttttccgggtagctcctgtttcatggcagaggttaccatgattgtgggtgggttaactaggccaggaatgggagatgaaaattaatttctcttttctctattcttcaacttttctcctttctctattcttccttctttctataactctatttcctttcccttcctttatgtcactgctcttgcttgtgccctgaacatcttctttcttttccctggtaatccattctacctgttcttttcttcctcctgctgtgatgtcaacaattcccattcatcatttgttttttgagacagggtctcactatgtcaaccaggctgaagtggagtggtgtgatcacagctcactgcaacctcaacctcaagcgatcctcctgcctcagcctcttgagtagctgggactgtgggcacacaccaccacacatggctaatttttgtattttttgtagagatggacttttgccatgttacccaggctggtcttgagctcctaggctccagtgatctgcccacctcagcctccaaaactgctaggattacaggcatcagccactgtgctcagcccctactcatcactcttaaaagaggaatttataaaagtcttcaataaacaaaaaccaaagtggaatttttaaacaattccagatggtagacaatgcaaacacctgctggtagttacacatcctacaggaaccatcttacctgtagccccagaaatatacacaggtaccagggaggaacatcttctatggtataaatcatgtctgatcgctgggggtccagactgccagtgctatccagggtctcagcgagagagctctgcgagccagaaggagaaaagaaggtgctcattaaacgtgaagaccagtgttagctcggccatgtacaggccactattacagaaaaacaactttatcaagtggttgccatcttcctgcagttttgagccttggctatctttgaagccaagtattctctttggctcaagtacagtcgcccaccgggatggtcaatcctcagaatttggggggtcagcgtccttgggcaacatctcatccctgagaacaccaaacttgctcagagcttctccccaggcctggggatcctcctgcatggacagagatgttcccaggttgagaccacaaaatgataccttggcacgagcagtccttgcgtgagaccccagatgaaaaaaatcttagaaaattttaaccactttcaaagagacagcacactgatctgcccctcccagcccacttcatccctgcaagtaaaaaggatctttgtactttaaaattctacaccctcctatccaaacactattgctcagataacgttaggtgaaaagagtaattctaaagtatataaacacggtgatttgaattctgtttaaaaaacaaaacattaaaaatgtattcatagtttaggtgacaggttttttcttctttttctcctaacactagtaaaaaaaatattttaaaacattaagtgtggcatggttttttaagcaaaaatcatcataaagaccagtcactttaggttagagtccagcctcttccaatcacccccagcatcagttctgaactcatgcagtatctgagccaaacagaaaactcaaggtagccccgagttccccaggagaacctcaaaactgctctggtttcaaacaccacacaaataatctttccttggaatttctacaatcatttcttggaatccaagatatgtatctcattttaagaaatgttttataacctagcaaacaaagtgtttaacaggaaacaaaatgaagagatatccacatggaaaaatgctgattccatgtgttccacccacatggaggcaacaggggtttggggtttggggcccaatacccttaaacaaaagaagggacacagttcaccctcacctttcacagccagaaggtaaatgtctgatggaagctgacatctcatctaatccaaatgtaactgaatatgaccttttgggtaaaactttctcttccgtcctaacaagggatactggcaaatttacattgtgttgaatttgttacaatggattatggatgtctttaaaaacttgttgggagaaatggtagaaaaagtacgtatgtgtctgaggggtgtagcatgtagtgatgtacaataaagattaactcagcaggtctgggttgtccaaaccccgcacatttcaaagaaagggttgagtcttgcctggtacgtgggggataacctgagctcttggggtttctgcctcttaaacatgtctttttaggcccagtgcagtggctcacacctgtggtcccagcaccatgggatgctaaggtgtgaggatcacttgaggccagggttcaagaacagcctgggcaacatagtgaggcctcttctctagtttatacatatttttttacctgaaacttggccacacagtgtcagcttgacctctggaggggctggtgagtaattaaagttagccacataggcagtcagccatacctatacgacagatccccaattaaaaaccctggacaccaaggcttggatgagcttccctggctgaatgggtgttatcacatatcactgctgggaaaactgaacactgcctgcatgactccactgggagaggatggctgcaagcctgtgcctggtgtctcctagaccctgcctatgtgcctttttccattgttgattttaatctgtatcctttctctgaagaaaaaaacaaacaaaaaaaaaacccttaactgtgagtaaaacagctctgctgaattctctgagtctttctcataaatcacagaacctgatttgggaacttctgaactgagggcaccattttgctaacgtgatggaattacagacctggggctcactacacaaaggtcagctcaacagcaccgcgtcagctacagccacacaggtggtgctgctgctcacaaagtaacatgacaaagtatttcataacaaagagaaatgtctgaagacagaatacataaccctatcatagactagtacaacctgttatacagtaatgtaagcaacatttttctaacaattccaaaaccactagtgttaattataaggcagatgaaaagactttttggctaggtgcagtggctcacatctgtaattccagcacctgccaaggcaggtagatcacctgaggtcaggagttcaagattagcctagccaacatggtgaaaccctgtctctactaaaaatacaaaaattagctgggcgtggtggcgtgcacctgtaatcccagctattccggaggctgaggcaggagaattgcttgaacctaggagacagaggttgcagtaagccaagatcacaccactgcactctggcctgggcaacagagagagattctgtcacaaaaaaaaaaaaaaaaaaaaaagcaagacttttcgcatccaggcagaggttaagatgtacacacaggcgcatgtatgcacatgcacacacacaagcttttcttagtaatgagggtagccctacaactcagaaacaaaactagtgtaaaggtccacaactggtactaaaatgatacaggagggggctgtgtggtcaagaggatcagacaacactgtgaggcagacgctgtgccccccctcctgatgacagaaggaccactctggccattgtgcactctacgcactgtggcgccacactcagtgatcactgtaaactatgagctattttaaatactgcaaaaacaaaaacctctaataaggtttctgtaaaagatgactacataaataattacgtcactttacaaagactttccatcttattctatggtccaaaataatctaaagaacaaaaaaactgcctgtgctccaaagactagagtgaactcagaacgctgttctctgcctggagccttcttaacatttttaataacctttgctatctcctctgcggttatttatctagtctagcacctttggggtcgattgtagtctctttctctaggaaatcatttcttctgcagcacagtcagcacatattttttataaaggaccatacagtaaatatttcaagctttgggagccacatggttctgtcactgtagcatggatgcagccttaggcaataggtaaacaaagaaatgtggctgtgttccagcaaaactctactgagaagaacagatattaaaccaaatttggcttgccaacccccgctgtagcgtttcaaactgattatcataaagtagcatgtattattctcttgtacatttctcctttttactatactaatgtatatgtgtgctttctattttttttctcttgatcagggccacaacagatcagttttggccaggcatggtggctcatgtctataattccagcactttgggagaccaaggtcggcagactgcttgagctcaggagttcgagaccagtctgggcaacagacagagaccctgtctccaaaaacaaacaaacaaaaattagctgggtgtggtggcacatgccagtgatcacccgctcaggagtctgaggtaggagcatcacttgagcctgagaggttgcggctgcagtgagctgtgatcatgccactgcactccagcctaggcaacagagatcttgtctcaaaaaaaacagaacaggctggtagctcacgtctgtaatcccagcactttgggaggccaaggcaggccaatcacttgaggtcagcctggccaacatggtgaaaccctgaaaccctgtctctactgaaaatacaaaaattggctgggtgtggtggcgtacacctgtagtcccagctacttgggaggctgaggcaggagaatcgcttcaacccaggaggcagaggctgcagtgagccaagatcgtgccactgcactccagcctgggtgacagagtgacactctgtctcaaaaaaacaaaacaaaacaacaaaaaaccaaaaaacaaaaaacccaaaaagatcaatttcattattcttttcaacaagccagcttttgagttctagttaagcatggtagattgaccacatgtgtcttttcttctaagtcctaaaaacaggaggaataaatatgatactcatcaacaaggacaaagcaaagaggagatcaagaaaaagagattaatattttttttaatatggaaattgtttggatgatttgtgaccaatttgggagagggaaggaatgcacaagctgggtgctcatagaaggatgctgtgaagaggtgggctggctgaccagcaggaccccagaaagtgctatgcttggaagcactagacagagtagcaatggggagaggacaggtcttaactccgcaaactggtcagacagtgtgttaactactgctatcctcctccttcaagaaacaaatatgtatggtttgaagaatataaattggaaagccctcaggctgaggaataccacacagcgatcaaggaaaacagcagcagcaggatactcatctgcttccagaatgccagaaaccaggtcacagaagccagacttatacccacaggagaccacacgattcctttctagagaaagttgatcagccccaaagacaagatagtgacatctatagatcccacagagacaacacggctttccacctggtcactcaagggcaggcccacgattagataaacttcatcacacacaaagacctcacaatcctatcttttattgcctcctatcctggaacagtgaagaaagactaaaaaaatgaaggcaaagaaacagaaaatataatcaatgtagtattttttaaaaagcttaaaaaaaaactatcttcagaaaaataaagttacttcaattgtgggagacaaagaatgctttttaaagactttaaccagtaaacaaaaccaaaaaacaataaaagaggtctcagaaattaagcacaggatagttttttaaaactcaacagaagggctggaagtcaaaggtagctctcaaaaataagaaaaagacaaatataggtaagagttaagtgttaaatgtcagaacaaggaaaaaagaatatagaaattaaccaaagaaataagaaaaatttaagaaataaaggacatgttaacaaattagaaggatactacagtattcaatggattaatgaaaaaatgcattttgaaaataaaacaatcattcttactaaggaaggccttaaaattcaaacagacatttaagggaaactggaaataaacatgagtttacataatttggccagatggaaaggaaaaaaaatacaaaaaactatgaaagtgtgaggagcacaaggaagaacagataagctgcaaaacagagtaagtgtcagagactagaatgaaaaagctccgtgctaagaggaaaaaaaagattaaagagaactgatagctggaggaggcaggcaaagaacaaacaaaacatgcataattgcagctcccaaatcagaaaccaaaagaatagactggaattaatatttaaagatacaattcctgagataatagcagcctcaaagctaaatattgaaaatgccaggaaaaactggcccagaaaaggatatacacatgggtcttgagcatgtgtaaagagatgcagcctcactaatgaaaaatcaggataaaactacagtgacgaacctaagctgagagagattctacaaagtaaactggcttgtaccatgttacattaacaacgaaaaattgttccagattaaaggagactaaagatatacctaaaaagtaaatgcctcaacagcccctgatttgattcctggaccaaaacttttaaaattaattaacttatttatttattttacaataatgaacattatttggacaactgaggaaatgtgaataaagcttgtagatattaaatattttaaaattgggattaagtaataaaatcaattaggtattgtatgactaataatttaattcatcagtgttaagaattgtactgtagggaccgggtgtggtggctcatgcctgtaatcccagcactttgggaggccgaagcaggtagattccttgaagccagagttccaggccagcctggtcaacatggcaaaaccccgtctctactaaaaatagaaaaattagccaggtgtggtggtgcacgcctgtgatcccagctacttgggaggctcaggctgaggtatgagaattgcttgaaactggggggcggaggttgcagtgagctgagattgtgccactgcattccagcctgaatgacagagcaagactatctcaaaaaacattgtactgaagttataaaacaaagagaatgtctttgttttaaggaaatacacatgcagtattttccctaaataaagaggcattatgtctgtgagatttgaacagctcaaaaataataatatgcctacaagaaggatgaagaaaatacagtaaaatgttaacatctggggcatctgtttgtgtgtacctatgtggaaagtggtatggaatatacatacaggttgaaaatgcttggaacccaaatgttttggatttcagatttttttgggattttgaaatacttactggttgcgcatcacaatcccaaaactcaaatccaaaatgctccaatgagcaagcatttcctttgagcatcatgtcggtgctcaaaaaatttcagatattggaacattgcagatttcagatctcagttttaggacggttactctacatcaggttgccagccgctggttacgtagaatatataaagaacgtagggggcacattttcaactttctccattttttggactgtttactattagacaatcatgttaaaatgaatgtcattttttttttggaacaactagtcctttaacaaaagatagcttaaagagaatccacagggatcaagtcagaaaaggtctcttttgttttgagacagtctcactttgtcactcaggttggagtgcagtagtgctatcttggctcactacaacctctgcctcctggattcaagcaattctcttgcctcagcctcccaagtagctgggattacaggcgaatgtcatgaagcccggctaaatttttttgtatttttagtagagacggggtttcaccatgttgcccaggctagtctcaaactcctgagctcaggcaatccacccaccttggcctcccaaagtgctggcattacatgcatgagccacccacctggaccaagtcagaaaaggtctctaacaaaaaaaagtagatctcaaagttacagaagacaagtttattttatcttgtatttaatatgataattgcaactaagcatttgaaacaacgggcagcaaaaggcccagtggcacacagggcagcacatccagtgcaggctctttaataaccagcttacatgccactctgctcacactggggcaatccggcttcctgagagccttccactacttttggccgggtatggtggctcacgcctgtaatctgagcactttgggaggccaaggcggataaatcacctgaggtcaggagtttgagaccagcctgaccaacatggtaaatccccaactttactaaaaatacaaaaaaaaattagcctggtatgatggcgtgcgcctctggtcccagctactcaggaggctgaggtaggagaatcgcttgaaccagggaggcagagattgtagcgagcagagactgggccactccacttcagcctgggtgacagagtgagactctgtctcaagaaaaaaaaaaaaaaacagcccgctgagggtctggcttaatgactagcattttatttatttactttttttgagacagagtctcactctgtcatacaggctggagggcagtggtgccatctcagctcactgcaacctctgcctcctgggttcaggtgattctcctgcctcagcctcccaaatagctgcaacccaaccacaggcgtgtgacacccctcctggctaatttttgtgtctttagtagagacggggtttcgccatgttggccaggctggtcttgaactcctgacctcaagtgatccacccatctcggcctcccaaagtgctgtgattgcaggcatgagccaccacgcccagcccaactagcactatttaatatgtagcagctcttctcactgccctcctcatttcataaagtaagaaaaatggccaggaaaatattaagatactccatttcattggtattcaaggaaatacaaatgtatcaatgtttagacaatgaaaaaatgttcacccaaacaggaaaatgaacatctagcataaatgtgctagagacatttttcctacaactggatccctcccatcagtaaaaggtaaagctaagccccaaagtgttaatgctcatcactatttatttctaaagacgatctccagacagagaaggaggaagtctgaaaacatgacagcctggaatcatggcatagaggattatatgtggcccaccaagtctgtgaagaagccctttgttacaagatggaccgtgtgaaagctgcggcccggcagtgtgggatgtgcctcagctgcagaccacaggcaccaatccacatgccaaacaccactgcactaacctttggggagcagcttggaaccccgcacttctggaatttcagtatctctgcctgaatctactttaattaacctccataaaatttataatagctccaagcagcaggaaaataataacaatattggttgagaggcaaaaatgaaatttccatatcccagactggaattttgtttaaaagggcataaaatttggttatttcagaatttcaatacaatttatttgttcttaatcactttagtgattacactgtgaactcaccatgctaatacccaactcaggtactatatttgtatgtgtcaacttctgggtggtctgttattagaatacatagtatacactgtctacagtataatacagtggttccagaatagaatttctcattacataaattgtttagtttcttattatgtcagctgaaaattagtaaattttcatagtataaataaaacctgtgtttaaaatctatcaagtaaaactcaaatgaaagcctcagagctgcgatacaatttggagatatcagattatctaacttctcatatgttagacatcatggcagatacaaagaaaaaaagaaatcgggatatctggacctactttattttatttttatttatgaatttatttatttattttttttagagacagggtcttactctgtcttcccagttggagtacagaagcatgatcttagctcactgtagcctcaaactcttaggctcaagcaattctcctgcccctgagtagctgctactataggcacacatcaccacacctggataattatttctttttttttttttttgtagagacaggatcttgctacgttgcccaggctggtctcaaactcctggcctcaagcaatcttcccgcctcagcctcccaaagtattgggattataggtgtgagccactgagcccagattggagccgctttgggcaactttatcctgacctctatggtcacaaagtctgaccattcaaggagatggaacgaggcacagagcaaaacaaaaataaacaaaaaaaccacaaacacgattctccccaccttagtgtgccatttccattggcacactaaggtgccaaaggtgctacggtcaaaactcaaaggcattttcataggctgcataaaccacttgctgatttcccttattctcttatttactgcacatgtatctgtaacaggcacgatgctaataacttcacatatcatttcattcaatccacaaaacaaccagatgttgacatttttattcccattttagagacagggaactgaggcccagagaacttctataatttcctcagtctgactcatatttgcacccagacctgatgccagacctcaagctcttaaccacttccctctgccatcttggctgaggcctttttaaatacctggatcctcctctatggttctcaccttaaatgccattaaaacaatcaaaaaaaaaaaaaaaaaaaaactagtaacttctattccctatggctcctcctacttcccttatgaagagaacacagccccttgggagtcagagaccaagccccagacgaaggacatgcaagtgtctgaaagggatccggatccagatccggggcagcacttgtgggaggggatggcggtgggagtggggacacggggtgacggaaggggtaccttttctgcaatgccgttttccgtagtgtagatcgccatgagctcagtgtcctcattgtcctgctcaccgctggaggtggcgcctccatttatcaccacctgcagagacaatccacttagaggctgtttcagcgtgaaccacattttcctccccccgaaagccatttgtaattctcctggtgagtgcatgaccaggcatggttttgatggagaaacatactccatgtaccgtatggggaggctgccttagcagaaggctcagccggggagaaaagaaataaaatcccagggcaacctcagcaggggcacccccacatccttcaggggaagggaagtttggctcagaggcccatgctgtttgtggacgaggcccaggctgaacaggtgagagtaccctgagctgcctcggttaagatccctgcccacataaccacctgaggccgacttcctgcacctagaaggggaaatgttctagctggaggaactcaagctttgctgttcacctaagtaaaccagcccactggagaacactcctcggtaaggggccacaccatcgtcccgggttctgccagccagtagcaagagccataaaatatttttactttttagccaaacggttccacttctaggaatctatactggagaacaataatgagaacaaaagctttaacccaaagaaagtaatcactgtttataataacaaataactagtttttgtttttttaggttttgttgttgttgttgttgttgtttcgttttgtttttgagacgatgtcgcgctctgtcgcccaggctggaatgcaatggcgtgatctcggctcactgcaacctccgcctcccaggttcaagcgattctcctgcctcagcctcccgagtagctggaattacaggtgcccaccacaacacctggctaatttttatattattagtagagacggggtttcaccatgttggtcaggctggtctcgaactcctaacctcaggtgatccactcacctcagcctcccaaagtgctgggattataggcatgagccaccacacatggctcaaataactagttataggccactgacacccagaatactacaagggaaaagatttttacacagagtaatatcaaggaaaatgcacatgtaataaatattaaggtaactgtatatatggttaacagtgcaactacatttaaaaactacagatttaaaaagtatattaaaagttcaaattctggcattgtgaaatacactaaaagcaagcagaagacaagtgatggcctaggagaaaatacagtgcagcagatataaaaagggtcagtatcaatatgcgtaaagaacacctcaaaccaataataaaaccaaacgatccaattcatccctgagaggcctaaggaaaaaggatggaaaggaaatgggcaagggctaggaatatatcattcatagaagaaaaacatatatacaataaaacacatgaaaagctgttccatatcattttaaattatggaaataattattaaaattttattttaaaaaaaacaaacttagagggaaacttaaaaaactgaaccaggtattgaccaaggtatgggggagagttactctcctgtgttcttggagagaacatgctcttggtggaatggccttcatggagggaaatttggcaatgggatttaaaacaggtatttctgtggatccagcaattatactcatagaagcttatcctctagaaatatccatgcaggtaatatatatattcaaggttgatcactgctgtaatttatgaaatactgaatacttggggacaacataaatgtccatcaaaaagacacagttacattattatacactcatttagaggagataatcagccattaaaaataataaagcactggacacggtggctcaggactgtaatcctggcactttggaaggctgaggcaggcagatcacctgaggtcgggagttcgagaccagctggccaacacagtgaaaccccgtctctactaaaaatacaaaaataagccaggcatggcgttgcacatctgtagtcccagctactcaggaggctgaggcaggagaactgctggaacatgaaaggtgggggttgcactccagcctgggtgaccgagcaagacatcgactctaaataaatacataaataaataaatagctagctgatgtactaattaaaaaaaaactccaagaaatactgtttttaaaaagttataaaacaataagcctagaattatcccaactgagctaaaaaagaaaattgtaatgaccccaccacttgtctaaaaaggacagaaaagcatacaggaaaatcacaaccagtaggaagggtgctgccttagggacaagaacggcaatagcagacacctttcatctttttactcacaaccctttgtaagtgtttggatcttttatgatcaggatgtatttgtgttatttgtatactgcttttttaaaaatggataatttaaaaaaaaagacatactccaaaatgctaacagtggttgtccttaattggtagggccatttttgccaactttttcccctttttatattttggtcatttcctaaaatgagtaagtacaatttattttgataatagggaagaaatttaagactaaaatcctagcagtacagcttggattgaggaggtccagagagattcccaattcatgtgtttttgtagtcaaggaaatcagggcagtgaaaaattaggtttctcattcaaggtcatacagattataacctaggtctgaagtgggtttttaagtatgccagagaggccaggcgcagtggctcatgcctgtaatcccagcactttgggaggccgtggcaggcagatcacccgagatcacgagttcgagaccagcctggccaacatggcaaaaccccatctctactaaaaatacaaaaattagctgggcgtggtgatgggcgcctctaatcccagctacttgagaggatgaggcaggagaatcgcttgaatccaggaggtggaggttgcagtgagccgagattgtgccactgtactccaccctggtcaacagagcgagactccatctcaacaaataaaaaataaaataaaataaaaataaaaactatgccagagatctcaattaattagtacatactcctacagagcagaattctcttacattacttcaaataaagacctgcttttaaaattatttctcaaacatgttatagttttttacacaagccaactgagtttgtggagctggtttacctataaaaactggctgctgggaggatacacattcctggccaagttcaggtccacgagatgaaactcttaacttacagagagaactgtgctccaagtcatatcgcagcagtgctcaacccactgagaagccaagagcaacacgctctcaggatgaactctcctaaaacacggatcagttactaaatcattagagaaacctagatatgattgaaagtctgactctagccaaactaaccttcacctgcatttatctcgggttgctgcagggaacagcaactttaccagtaaggggtttcctttgcaggagatgaaaatgttttggaaccaaatggacgaggctgtataacactgtgagtgtattaaaatatcactgaattgttcactttaatttcatgttatgcaaacttcacctcgatacattaaaaaaaatcatctgtatacatggcactaagaagatagattttgaaatgagttagcaattcctactgctcccctgacacattccactcactacttatacatacacaaataagtataatgatccccaacttaaatggttaaacttaggattttttgactttacagtggtacaaaagtgatatgtattccgtagaaactgtcaagtacccatacaacccctctgctcttcacttcagtattcaagaaactgcaagagatattcaacacttcaccataaaataggctttgtgttagatgcttttgcctaactacaggctaatgtaagggttctgagcacatgtgaggtaggcggggttaagctatgaattgccagtaggttaggtgtattaaatgcattttaggggtgtaactctgtcataagtcaaggaacatctgtattataaaatgcagacactcctaagcctagaaaaaaagctcacatattcattcattcaacaaattgtggttgtatcccaggcaatgagaatgcagtcctgcctccctgcaggagctcagtccagactgagtgccccgccaaggaattccgctgttacacaggaggcagtcagtagccacaaagaaatgccaagaacaggagtgccacaatcagatgctagcactggacagccattctgggtgcagcaggagagtggatgggtggggtaaaggaatgaccctttggcacacgaggagacaggagctgggcaaaggtgttaacagtggtctgggaaagacagtcagcttcaggagagagcaatgatgtggacttaatgccccctgaagattgtctggatgggagctctgtggtgagtacagcggggagatgccatcacagcacagcagggggcacgggagtaaagtgtccaggctgggtttctcagctgggaagctgggtggatggaggtgccagtcccaaagagactggcaggaggtaggggtggaatgtttgtaagccaattcaaaatgtgtttgacccacagaaatcatccaaaaaaggaaggtttactttgccaggctagtccaggaagtttatttaactgtaaatactactgacctagaaaacctatgatttgcacaggtccagctgtctgtccctggggacctcagagcccagcttccccctgctaccctcctgttgcccagctgagatgtagctctcctctccatgctacccccatcctctaaggaagcctgtaataagacggggacaccagctggaaatgctcttgtctgactggctcgtctctgatctatttacgtgcagggggctgcctaaatagttcttgcctaaatggttcttacagatgaagagttctactggaagtactagtctaccttaccaacattttttcctttggcttattaaaatagatactctaatggcctatttttaatgcaaaatttaattttaaaaatcaaatggtaaaaatcagttcttgaggactgaattttttatgggaaaaggattaaaatgctgatgatagtagcaaagcttcatattttggaacttttaaatattattttaactgggaaataaaacatgtcttgggaagctttctaaacttaataaagtctggttttcttttgggtaactaatagataacagaagaatcttggcatcgttcacctcaggaaattgatcaagtttttataaaaatatcagcagattagtataccccttttgggaacaagatgtcctttcttctccaaaactatcttaaactaaactcgtggccttaagttttgtctcctaaactaacattgtacaatcaatcagctatgaaaggaggttttctctgcctaaccagatgattttgtctccaatatgcaattgcatttgcattgtatttactgagcaacggacacatttccacactcaaagtcaagtcttacacttgtctttttgcttgtgttttatttttactaagctaagacaatggtattaaagtacttatttctaaacagttctcctgagatggtcagaggtgtaggaagcaggagtgacagaagtcattgcctagaggtgtcagtatcacagcagtgccaggcgaaactgacagctgtgtgtgcccacatttctcaagcagaagtgacagtgcatgtgctgcttcgtgacacctgtcaagcggagggcactagcacctgcaaaaccccacacctccaatgagagtgttcagaactcaatttcccacttactatatcgtgtctggccgctaagagaaccactttatactaaaccaatcgctttcagaatagtaataaagttccccaaatttctgctttctattcttttaaaagaaaggtaacacacagttattaatccccctcctcaatgtgtgcacacaccgttatttcctcttgtatccaaatctactccacaattaaaatgtgttttgaatacagaagataatagattcgtgtttcccagcctttactgcaagctcctttactatgaacatgaaaactttccacctactttcaatattattagaaatttcaaaattaaccactatgaaaaataaattcaagtgagtacagtacaacatattctaaacacccaaagcttgtcaatctagattacatcatctcaaaaagatgcagcagccgatagatctaacatgacactagcgaccttgaatctggctgatgccgcaaagcctctaattttgctttcactgcctcttcccacaggatggctcctgtaactccccagtgcaggtgatgctgctggatggctcagcctccaccactcgcctggcccagcctggtcttcttagggctgccttctccagaaggctaaggctgtggcagccagaagcaccccggggattccagctgcatctcacctgtcccccagtagggcgacaagaggagccagaaggagccttacctctccccatgccggcccacagcagagctcgggcgggtgatgtgtctgccaaggtccacactgaaacactctgcagtgtgtgctcctcccacaccccaggcaggtggtgctggtgactgctactgtctgcctggcacatattcatgcctggcactaggttgggcacttcaaacatcttccctgctaggtgaggtttctaagagatgtccctggggatcctgtccccagatggattcaagaacagatcctgaggccacgcagcacattacagcactccacccaaaacggaccgtcctctcccattctttccaggtgctaacacattacagataacaaacccatgtctctaaaatgtaaatatggaagggacacaaacccaacaagaaaagggctaacatcccaacaggaaaataactaaggaaataaacatgcttcttgaacagtaaaaagatgctcaaccttactcataagaagatatacattaaaactatgatgagaggccgggtgcggtggctcacgcctgtaatcccagcactctgggaggccaagacgggtggatcacttgaggtcaggagttcgagaccagcctggccaacatggtgaaaccccatctccactaaaaatacaaaagttagctgggcatggaggctcgcgcctgtaatcctagctacttgggagactgaggcaggagaattgcttgaacctgggaggcagaggttgcaatgagccgagaacatgacactgcactccagcctgggcaacagaacgagactccaccaaactataatgagaaacctctttctacctactaatcgggacaagagcccagtctgaccacatattctgctgccaagcatgcaagaaaacaggcatttacacattgctgacgaaattcctcaacagagggcaatttggtgagtagccccctcagcttaccaaggcacatcccctctgactcaaaaatctcactcttggaaatctatccttcaattacacctgagtgaaacaacttatgtgccaggttattcagggtagtgctatttgtaatagcaaaacattagaaacagtctagatgtctatctgcagtaattaaataaattatggtgtatctataccatggatcactttgcagttataaaaaacaatgaagataatccttatacactgacacaggtatacagaacatcatctgtatatcagaaagtgaaaagagcaagaacggagctacagacacagatctgtagatacagacacttccttctacaacaaaaactgctccccctaaacagagacagagtaaacatccccctatcctagggctatcagtaatgacaggcacagatctggctggtggtgcggctggttctccctctattccctcaaagtgctatcagatccagggatcttctctgtaattgttctgtatgatgcagtatctttgatcaccagtattactccgcaggaataaaggggctagggagaagaataggcacaatgaaagaatataaatggccaaggaatgctggcagaagtgtttggcttcactgaaactcaaaattaaagcaatcagatacaataaggtcaatataaactaggctgttatttattatagcaaagcattagaaacaatccaaagtcccaatgcaagtggaaaagttagatccatgatttgctatatgtcacaattacaagttctgtttctaataacattgagatgccacgatatgatacaaagttaaagtcttcataaagcagattgtgtgttgatgagaattttataaaagaacactcaaatacttgtcttaaatctctggaaagaaatacatcaaggctgggcacagtggctcatgcctgtaatctcagcactttgggagaccaatcacttgagctcagaaattcgagaccagcctaggcaacatggcaaaaccccattcctactaaaaacaacaataacaactagctgggcgtggtggtgcatgcctgtagtcccagctacccaagaggctgaagtgggaggatcacttgagcccaggaggtcaaggctgcaggaagctatgatcatgtcactgcactccagcctgggtgacagagtgagaccctgtctcaaacaacaatcacaaccaaaaaaaaaaaaaaaagaaatacacccaaaatatcagtaaaatattttctgttactaccaaaataacagaaagtggtgtttttctggctagtgagattttaaattatttgttttcctcattttaccattctgcattttctgcagtgaacttatttctcttgtaaatgaagaaagttacacaaataatgaaaaagggacagaaaatacacatatgagaactacaaaaaagaggcagaagaacatatcagcattcttgcttcttccatttcaccccaacaatgtagtttgtaccgtaaaacctagggagaactatggatgcttaaaaacatccattttaagggcaatttaagagggtggggaatgtgacaactgagtgattactgcctcgaaacctccaatatcatatcttcctcctcaagtactttatcaaatcctagcaagaatgaactttttctccaatagaattatgggcttagattatggtaaagaaatcaatctgaaatattttatctctaatcattaaaactaagaagcctgcctacctagcttaggcaaataaaagttagtgggggtggggattaggaatttagaagtggggattcacctagaagaaaggaaatctgaagtagtcctggaagtgcaaaaggcacaggcaggaatagcaatcaggggtcagaagagaccaaggctgtggggcagggagatcacacagaggttgtcacgatgatcccaggaagaactgatgctgacccacagaaagcggagacagcaggatgaaggcagggggatcacatggggtaggaaaggaaggaagcttgtcaactacttctgatgcattcctgtcacagcatttagcaagagcagaacaaacaagaggtcctctaaggccttttccatgaccaagattccataaacctgacctcacagaaattaagaggtgagaggccgggcacagtggctcacgcctttatcccagcactttgggaggccgaggcaggaggatcacttgaggtcagaagtttgagaccatcctggccaacatggtaaaatccagtctctaccaaaaaatacgaaaattagctgggcatggtcgtgcatgcctgtagtcccagctagctacttgggaggctgaggcacaagaactgcttgaacccgggaggcagaggctgcagtgagccaagatcacgccactgcactccagcctgggtgacagcaagaccgtgtctttaaaaaaaaaaaagcacacacacacacacacacaagtaagagatggccagaatgctgatcaacttcgtaagcctgctatagtaagagactgtagcaagaacctcttactattttcattcgtaacaaattgtgtgtctcccaactattagatgtgtactttgtattactaacatctctcatttcatttaaaactaccaaaactctgttcaaattaaaagtatattgcaatatgataaacttatctgaaacctcaaaaccagaggaaaaaaaattaatttttaagttaaaaatctaggactgggtgtggtggcttatgcctgtaatcccagcactttgggaggccaaggtgggaagactgcttgagcccaggagttcgagaccagcctgggcaatgtagcgagaccccatcttgaagggagggaggcagggagggagggagggagggagggaggatggataaggaaaagaacatcttaccatgcacaaaaatcttcacttgcatcccatcgttttgatgttttcatttcaaagcatatattggcatattccttttctaacactttttccccccaacttacaaattttaaaacagaaaagggtgctcatcttggttgttccacttcaagctgttaagggcatcccctgcctaaatcatggccattatgcagtatattaaaactctcatcttacagaaataggagaattaaaccaattccctgggccgactccaggaaacagtctctcttcatcctcaggcccttcttggaatcatagtcaattccaaaatctattattcttacagaaagaacattttcccagacaactattattaccatccaactgagacttttcgttttaagatctaagtactccaaactctctatttagggatgtacaaaaaggaacttcacagcacctggtacgaaagtcacaagaacaaggacatgttctgggcttctttgcttggtttttagaatgaaggtagttgcaccaaaaagcctttttgccttcttttcactgctgaaaaggggcatgttcaaatctgtcatcacatagtcaggggtttagaggaactgaagcagccattaaatggtttcttcactgtacctccctacatctttctgccaaggccacttgtcttaaagaagggatgggaaggaaacagaaaaggaaagaaaggagcatgggtccctgatcctggtggctgccctcctcccctccgctctggggcatcctcacatccctgcatccttgcacagcacagctctgagccgcatcgccactctgtcctgctcacctcctgcctgctaggcacacccatcaggacacagccccacaggccccaggtctcctcctgaagctccttccaggagtctcttccaggacagcaacttgccccttcttttcaaagctctcggccacacctccagccaacccttcctccactgtggctcctccccgtcctccctctggagtcagagtttctcctgacatacttttcaacgcctggaatgggtgtctctttctgaagggacttgcccccaccctcatccagcccaaaagcacagaaactaggtctgctccagagcctggtggcttctcccacctccacatggcaagcacccaggatgcagctgctgtcagcacacctgtcctagggccaccagctcctgcctggcctcctgcttttcctttcagcctactccccactaggcagagcatgtcacatctctgctcaaaggcctccaaaggtttttttcaggccaacaccctggtgaggcccacaagacctatggaatctctggtcaatgcccatcctggtggagcaacaccaggcacccccctgctgtggggcctttgcccttgaggcccacatgcaggcttcccacaactcctccaggactttactcaaaggccgccttcttggtgcagcctttcctggccgcctgaattttcagcatccatacctctaccttatttttttccctagtgtttgtcaatatctaacatctacacatttgacttatttctattgtggattgcctgtctcccacaccagaatgaaagccctgtggccaggcaaagtggctcccacctgtaatcccagcactttgggaggctgaggcagaaggattgcttgagctcaggagtttgagatcagtgacatagttaagaccttgtctctacaaaaaaaaaaaattaaaaatcagctgagcacagtggcatgtgccatatttcagctactcaggaggctgaggtgggaggatggcttaaacccaggaggttgaggctgcagtgagccatgatgatgacactgcacttcagcctgaatgatagagcaagactctgtcaaaaaaaaaaaaaaaaaggatggaaactcatggatttttgtctgtctgttcattgctgttctctagagcccagacctgtgagtggcacacagttcctatttttaaaaggacaaattaatgaatggcttgcaggtcctgtatgatcactgtctgacctcacattctatttctcactattcccctccctgatttatttttcttcacagaattagtgaccagctgccacaagattgacgtatttgcttgtttctttactgtttttctcctcccaccatcactaggaggccaattccaggacagagcctcacgcaaagcaggtgcccaataaccatctgctgaatggaagaattcctttcctccgcactttccaggtcaggtcactgtcggctcacacctggactgcgtaagcaccctaacttgccttcctatctccagacccttcctgccccggcacccaccgcaggaatttcctaccccaaaacgagcaaatttactatgacctctcctcagcatccctgctgctcatctccacctccactgtactctgcactaaacttgcgccccaagcaggacactgccatgcacaccctcagctgagaggccttcagtctccctcctcttgacctactatacctagacattttttaggagttccatgttatctcccctgggaaccttcatctgaccggcaaggcccaccctacaacacgactgggcaagggtctcacgtggacactatcacagcacccgtgcagaattcaaaccctaacactgatggtatgctggctgtcttgccatatgtcccccactgggctgtaagcagctggttaccaggtatgtgcaccagacacatttaatcaatggaggaacgtgaggctgtgggctcttcccattacatgttctgaagaacacacaccaaggtaagatgagaagtggtcggttcttatgaacacccaggagtatttctcccactctctggtaagactaaacctcataaagttactcgtcggtccatgccgctaatatctccagacagaataatctactcttgatacccaaatattctcacaaaggctgttaaaagaaataaaagcttaaggaagcttaaacgctttccctgactctgaatgatgacgcactgaaacaacaggctgtgtgtgtcacagccgtgcctgtgccaacaggaagtttgggctgttaactgggcttccaggtttaggtggtccaagaactgctgagcaaacacacagcctttttctggccgtgcttcctgtctgtactttgggatcaatgtccctagggtacgatcgttcatcagaattttttttgctttttttttttttttttttttcctgattcctgtttcttgccatgggcattcacccctatttacgcatttcctagctggctttaaaacataagaatttgcctaactagagtcctgtgggataagaagaagatcttttgctatgttccccctatttgatatcaactctgaccacatgatctaatttccatgagtcctggggcctggcacatctcttgttcttactttgacctagtggacattctacttctaagtatggatttgttctttttctttgtaaaatgtttgtgtgggtgttttgttttattttgtttaaagatctgggaagcactcatccaacacaggatgcctaagagaatctctaaagataagatccttatcagccacacaccccacctccctttccaggagacaccccacaagcctggttctcagcaacggccagatttggttactggtgcccaaccacgctgcactccagcacacctttctctagatgccttaacagctgacagcctaaagcccagctttggattctgaggcaaatgagaaaataagagccaacatttcagcctcgcaaggccctaaccagcaagcagagatgggctagccactagccacgtgtggctatggagtacttgacgagtgcaactaacgaagtgaatttcaggttttattgaatagtatttaatttaaatgtaaacgtcacatgtgactagcagccatgatgctggacagtacagatccagacaaaaagataaaacccagagctgccatgctggctattcttcaatatttacatttgcaaaggccagaatgaaacaaggcactagcatgcagcaatgtcctggcatgatcctccctgtcactcatgtgtgggtatacccaacggtgagaccctcaaccctatcttcctctgccagctctgcctgccagcagcaccctctcacacgggtcagtcaccacccacatgagccatcacagtgagtctttacagctctcctgatctctatgtgtgtcaagtcccacacccccactgcctgcaggctctaggagcaccgcagttcaaatccacaacttctcaaataaaacccatcatcttccatcttccccaccctccaaacttatggttttccctagacttcatattttctccaaagccaacatatacccaatcaggttcttctgtataaaatcttgatgagaatccgaaacatctccttctttggccctcaaaacctcctatcacctcttctatcagcctcacctctgttcttactattcccatgcctttggtatctcccagacccaccaattcttcctgtgctaccccactgcccctgcctccaaccagctgcccccacactaatcccatccatcaggcaatgggaagcgacccactgtaacttagtcccctcactttttccctgtcaatgggcaaatcattcaaaatggtcttctactttaaaagttgacttagggtagcaatttcactagtgattaaatacgggcagtactgtgttcctgttcttattttatatatattttggagacagggtcttgctctgtcaccaaggatggcatgcaatgacacaactgctaactcactgcagcctcaaacctctgggctcaaagaatcctcccatctcagtctcccaagtaggtaggactacaggcatgcaccaccacgtccagctaatttttaaatttttggtatgaatgagggtctcgctatgttgccatggctggtcttgaactcctggctgcaagtgatcctcccaccttggcctcccagagtgctgagattacaggcctgagcatccgcacccagcctataacatgttttctaacaaaactatccacaacccaaaactccatcccacaaactattcctttgtaaacattctttgatgaggttttgttttcgtgttttccttcttttatgtaatctactttatcttgagctttgggagttcagactaaggttcatcttggcatccctgacaccaaatcatcctgggagctcatgtttggactctctgccatctctatccttggcatttctcccctcccagcagctccatcccatgattccagctctattcctactctttgtagttcaatttagcataattttaaaaactattttcttccccttttaaggcttccttttatagccctagactgggataaaaattccataacatccttaattaaatggctctactgttaaatcaactttataattaacatcatatttacacccaactatggcttacgtccacattcccagctcccatgctctcacagggactcctacttaggttggatctggaaattaatgctgtgagcagtattccttcccaaccctgccctaaaaaatgtaacagggatagagggaaaaacctcaaaataggcaagcttaaaaagacaaacatttccgtacgcaagaaacatgtatgggctgggcacggtggctcacgcctgtaatcccaacactttgggaggctgagacaggtgggtcacttgatctcaggagttccagactagcctggcaacatgcagaaatgccatctctaaatttaaaaaatatatatatacacaaaaatgtagccaggcccagtagcacgtacctgcagtcctaactactcaggaggctgaggtgggaggatcacctgagccaaggaggtcgagactgcagtgagctgtgattgctccactgcactccagcctgggcaacagaatgagaccctgtgtaaaaaaaaaaagaaaagaaaaagaaaaaaaaaacacttatggaaaaaaatggggctgacactgggacctgctgggctgagcctggaagccctaagccaggcagcctcggctccagcaggggaacaaggtgggggctgaaccaggccaggcaggcttccccactcttccatgccatggttggcaaccctggggaagacaacgagggctccaccctagggtctgcctctggactggatccataatgagaagacacaaaccccacagaagcacagagaaagagatgaaattcctggaagattccagatggaaagagaactagggagggacttcatatagtatatcagggttcccaatgatttaaatgaagtcacatttaaaagaaacacatatatataagaaattaaggaccaaaaataggcagaagttaaccaaataaaaattttagaagaagtataattattgcaataagaattcaacacaaatacatgactgtatacaaaaaataagtaaaccggaaaatactgaaggactcatccagaaggcagtgctggaagaggatacccaaatcattagagaaagcagctaaagagaaatgaggacaggctggaaggctgggccgtatcattcacagaagtctgtgtaatagtggagggcaaactacaattatttccagatgtagaaagactaagatggtgaccatccacagaccatcagtgtatcttaaatgaaaagcaaactaagagggaagaagaagaacgcaaaaaataacaaggaatgaggaagctgacaacatacaatgatgaattcaactgctaacgataaaatactacaagtttaacctagaataagtaaatcttaaattctggaccataatgacaaggcaggtggttgagacatgttcaagttcttgtcccgaaagtgaagggaagtgagagtgaatcatctcctgggctgtaagataaaataaagccaccaaagagatgaggcaacccccatgcatgaaaccttcccattcactcttcaagttcatctaatttaatcttgaacaactggactgatgcctcttcccctagaaaatctgtgtcaaccttaagctttcaacagtgaagaaaatccagtttcaaaatttttcattataggaaaaaagaaaatggtaatgccagttgtaaaattagttaaacagctctctgagaattaatacaatttaaaaaaataaacgaataaagtgtgaacgaaagcagtcaatcaatgtacttaaaaaatgccatgttcagctgggcacagtggctcacacctgtaatcccagcattttgggaggccaaggcaggtggatcacctgaggtcaggagttcgagaccagcctggccaatatggcaaaaccccatctctactaaaaatacaaaaattagctgggcgtggtggcacatgcctgtagtcccagctactcgggaggctgaggcgggagaatcgcttgaacttgggaggcagaggttgcagtgagccaagatggtgccactgcactccagcatgggtgacagagcaagacggtctcaaaaaaaaaagatgccatgttcaagttagggttggtggcatgcatccataataccaactactcaagagtctaagtcagttggcttgagccctggaattcaaagctccattatgattgtacgactgccctccagcataggcaagagtgagactcagtctatttttttttttttaagaaaagttattttcttaaaataacttttatttttttcttaaaatatatttttcttaaaataactgttatttttttaagaaaaaaaaaaaaaaaaaaaaaaaagaatcctccaaggccggaggattgcttgagctcaagctctcaagttcaaaaccagcctgggcaacataaggagaccctgtctctacaaaagtaataaaaaatattagctgagcatggtggcaggcatctgtgatcccagctacttgggaggctgtggtgggaggactgcctgagcccaggaggtcaaggctacagtgagtcttaattgtgccactgcattccaactcgggtgacacagtgagacccagtcttaaaaaataatactgacacctctgtagatccatctaccctcaaatgtcttactgttgagtctctttatcatcaggctatggggcatgccaacagtttcagatgcaacattgataataataactaatcttgaaaccaggtgtggtggctcatgcttataatcccagtgctttaggaggctgaggcgagagcatcacttgagccctggagttcaagaccagactacgcaacacagtgagaccccatctctacaaaaagtagaaaaaattagccagctgtggtagactacaggctgcacacacctatagtcccagctactcgggagactgagatgggaagatagttcaagcctgggaagtcaaggctgcagtgagctttaagggtgccactgcactccagcctgggcaacagagcgaggccttgtctcaaaaaaaagaaaaaaggaaagaaaaaaatcctagaatactattcttgccattaaccacatctccagtattaagaggaaaacatcttgaggcaagacctctctaaagagcatttttctgtttttaaaccaacacattataggtaactttatacaaatcaagtcatcgtcctacatctgggaaaaaaatgttcttactgaatataaatgaatgtgtgtaatcagccttatctgactgctatcacttatttggataaaactacctctacgctggacactgctgccataatacatatggacagtggggttccaagcagtaagtcattcatcctcccagcttgcaatatgagtgtgatgttgggttgcacattatttcctaagagtacaccttttgaagataaaattaagtcttcaacatcctccaggacacagtaagcactgggctagatttaaaatgttaacagcaatgcatacttccttcctggagttaatcccagcagatgactccaggctgagagcacagctaaaacccaagagttagcccaaagactatctcacatataaagtatttggtttgcaaatgccttaaccttcactgaaaacatgagcattaaagccaatcctatgttgattccatacggaaactactttcaagagatttaagaaaggaagatggggaatatgattaccggaagagtgaagaaagctgggtgctttgcctcgtcttcgtatttgccttctgttgaacttccagcctccattgatttggatgtggtattcttaccaatacccatcattaagagaaacgagtagtttacacagccgttggggagagcagctggaagtgaaggcttattcaagctaggagcccaggatcagccggctcttctagtgcctggagcccccgattctcaagcagagatgaggcctgcaaacggcatctcttagcacctagaaaagaagagcacagccaaatcaccccaaagcatgaaaacaacacaggccatgcagtcactgagtttcttgcacagtaaaaaagtcacactacacattatacccaagcatccaaaaaatactttacctaattacagttttcaggcacccaacaccttctttatttatagtcacctactgattctgaattgcccactagagagggggaccactaaaccaaactatcaaaaatatcacaatactagggagaaaaaaaatagctaaggtacttctttgatatgcatatggtttatatctcataacccagcactacctaatagaactttctgcaatgagggagatgttatatatctgtcctatccaacagagtcatgtggctactgagaacctgaaatgtgcttagtgcaaatgagtaactgaattttaattgtatctaatttaaatagaaatttaagatacttgtagcttgtggctactatactgggcaatgcggatacagccaattaatcatgattagatgggcattaaaataattctacattccctacatgtgcccaattaaaagcaggggaagatactcaaaagcagtaaaaagaggaggttgccaggcgcagtggctcatacctatactcccagcactttgggaagctaagattttgggagataggtggatcacttgaggtcaggagtttgagaccagcctggccaacatagtgaaaccccgtctctactaaaaaaaaaaataataataatacaaaaatcagccaggagtggtggtgcacgcctgtaatcccagctactcaggaggctgaggcaggagaatcacttgaacctggaaggcggaggttgcagtgagccaagatcgcatcactgcactctagcccggatgatagagtaagtgaaattcagtctcaaaagaaaaaaaaaatgagagggcacagaggatccctccaaggaatggcatacatacaatgaaatatgcctagctatgcctgaatttttataaagaaaaagataatgcaaacaggtaagggtgggaagggcagagtgcatcccctggtactccaattagggtgacatcagatcttaccaccaattatcttcccactaggaataaagaatccaaccaagctgccctgcaaatgtgaggacaggactgcaataagtttggaaatacaagtacagaacttgctgtttgaggaactcttcatgggacacttcattcaataaacactttggatgagccaggggaaaaacaaaatgtaaagaaataaaaaagagaaagaattacacaaattttagagttcagaaatcagaaggccaaaaaggaaaacaaagaaactgctgccagaacgtgaagttccatgagtggaatacggagagctaggtacacacatcaaattcttccggggtggtcgttcttgtttgcatattcatgcacatttgcattttcattcacgtactatccacattcatttaaagcagtggttctcaatccagagtaattttgccctgcaggggacatctggcaatgtctggagatgtctttggccatcacaactcggggagagctattaacatctagtaaatagaggccaggtgtgctgctgaacatccttcaatgcacaggacagatcccacaccaagatttcaggagggctgagattgagaaatcttcatttaaagacacttccctcctcccaaggatggcatcccagatgtgccatgttaatcctaaggacaagatcaggtcctccaagggatacactcggaacatgcatatagcagagacagcaaagcccacacagaagcacgtctatgggacttactccagcttggtcattataaaaagaattttctggccaggtgtggtagctcacgcctgtaatcccagcagtttgagaggctgaggtgggtggatcacctgaggtcaggagttcaagaccagcctggccagcacggtgaaaccccgtctctactaaaaaatacaaaaattagccaggcgtggtggcaggcgcctgtaatcccagctactcgggaagctgaggcaggaggatcactcgaacctgggagccggacgttgcagtgagccaagattgcgccattgtactccagcctgggcaaaagagtgagactctgtctaaaaaaaaaaaaaatcttgaaacttcttgtcagaaaaaaaccaaggctgggcacagtggctcatgcctgtaatcccagcactttgggaggtggaggtgggcagatcacaaggtcaggagattgagaccatcctggctaacacagtgaagccctgtctctactaaatatacaaaaaattagctgggcgtggtggcgggcacctgtagtcccagctatttgggaggctgaggcaggagaatggcgtgaacccaggaggcggagtttgcagtgagccgagatcgcgccactgcactccagcctgggcgacagagcgagactccgtctcaaaaaaaaaaaaaaaaaaaaagaaaccataccaacacaagcagcttactgacaaaggaaagataatattaacatcagacttcttatcattaacagtaaaaactggaggaaaaagtgatgtttacagcatccagagagaaatgaatgcagagcctaaaatgccacatccagaccacctcaggggtcccaccaccctgccacagcccccgccacttacaggtcctaattcattcatcacaactctgctgtttaataaggatatgaaactctaccgcagggatcactacaacactgcaaagtctgatagcccttaatatataaaatctgtgcaggccgggcgcagtggttcacgcctgtaatcccagcactttgggaggccaaggcaggcggatcacgaggtcaggagatcgagaccatcctggctaacatggtgaaatcccatctcaactaaaaatacaaaaaaattagccgggcgtggtggcgggcgcctgtagtcccagctactggggaggctgaggcaggagaatggcgtgaacctgggaggtggagcttgcagtgagccgagatcataccactgcactccagcctgggcgacagagcgagactccatctcaaaaaaaaattaaaattaaagttaaaaaaaatatatatctatatctatgtagaaaaaatctgtgcaagtgggtaatttttcagatatgttgccatgccttggttcatgagtttttcatgtctgctggcaaccacagagcctcttttgtggcttatccccttatgtccttcgcctattttctataatgtttacagagcttcattttaaggatattaatcctttacatctttgttgtatttgatgcaaacattttatccccgctttttgtttatgaatttgggggatgaccttttgagctgccagagttgtcatcatgtttgtgtagccaaatccatcagccttctacattgtgagttagccactgccacccatcatcttcccaaaatctgcaaaaaacccagagtgaaaataaacatacctaaaaataaaatctgcctgaaggagccacagtggacctctgccttgagaccaccagaagtttattttttcagaaaataaaacgggcaaataggatagtgaaatactggtagatttttacatggccacatgccatatagtcacattccaagggaccaataagctctttgtcccacatctagcatgtcagcagagctttcaaatcacccttatctatatcaactttagggaaaatgatgggactttttttcttaaagagagggggtctcattatgttgcccaggctggtctcaaaatcctggcctcaagcgatcatcctgcctcagcctcccacgtagctgggactacaggtgcaagtcaccatgcctggctaaggaaactgatgggactttttaaagcagaataaatttactctcctaggttaagttcatcttggtgttccagacatgaacatccactgcagcagcaaacccctccccaccgtccccagcgctaggaacacacagttccatcccgacaagaataccttccagcaagtaactgtgctccatttctccaccacgcatttaatttaacctcataagctacagtgggggaaccactaatgcacttcacccacctcttccagagtagtgcctggagtatcctgaagccttagacctgaaagagcacaggagaggatgagactcatacagcgcagagcagtgatgttctgagaaaggcgtcagggaagaggactgcagggctcaggaagaggggagcacctttcatcagggacagtacatggaggaagaacgaagaaggggtgagcaaagaaatgtgtccttggacacgccataaaaagcccaaaaggacagagcattccacaccccggtgcacaaggatgatgcagacactctcaaggtcagaaagtatgcgacaacccgagatcagagggtttatccacacaggatgagcgtggtgtgtataaatgccaaggtccagcggcaaaatgcaacagataaaaggggagaggtgagggaagagtggagtttaacttctgtattaaaacaagaagcaaaatctccccgggaatttgacactggggaaagtgtgtgtgccaacccgtggtccctcattgccccttttcctaccctttgcaaaagagagaaagagaatgagcaaatccactcgctgtcttggccttaatacatgacagtggggaaggaggagcagagggatagaagatcatgatggcgacaatggcagtaataactgcaattttccagttgctaagtgtcggtgtgtgccaggcacttctctgacctcttattaaataaatgacagttatttctggccagtaagcataatattacttggtttgcacacaaactctacaaaagtagaaactgagcttcagagaagtcaaataacttgccaaagtatacacagctataggcagtagaacaggattcaaacttgaatcagtaatctgaacctgccattacactgtttatacaagacataaaactgccctttaaatgctcagcttacagctgttttccctggacaaacacagcccaggccagctggcctatacacactgcctctgtgagacttgctggtgattttgccctccttgtgatttttgagggggcactgaggggcaggaatcaccttcaagctccttttccagggctgatacccaccctccttggactaggaactctctaacatatgcacttctattcacctgcatggctgctccctagcacacatcaccatggtctctcatcaacatcacaacagccacttaactcgtgttctcattccatcttttttttttttttttttgagataggatctcactctgttgcccaagctggagtgcagtggcgcgatcacagttcactgcagccttgacttcccaggctcaggtgatcctcccacctcagcctcctgagtagctaggactacaggcatgtgccacacctggctagtttttgtagagatgaggtttcacaatgttgcccagggtggtcttgagctcctgagctcaagcaatctcctgcctcagcctcccaaagtgcagggattacaggcatgagccactgcacctgtaatccagactcattccatctttttttttttttttttttttgagacagagtttcactcttgttccccaggctggagtgcaatggtgcgatctcggctcaccacaacctccacctcccaggttcaagcaattctcctgcctcagcgtctcgagtagctgggattacaggcatgcgccaccatgcccagctaatttcgtatttttagtagatgttggccagtcaggctggtctcgaactcccgacctcaggtgatccgcccaccttggcctcccaatgctgggattacaggcgtgagccaccatgccgggcccctcattccatcttgatggctctaaacacttgtccaaatggtaagtagcatgatgcttcaacagaaaattaccatgctctttgatggcttcctaatttagagtgacacccaaattccttcacaagaggtgactatggggcctatccaggccccctttcccagtccctcatggcccctactgtggttactcacaggcctctcctatctctcaggaccctgctcatgccatccctccaaaataagcccccttcatctcaccccttctcactggggtgactcccatcaatacttcctctgatcaccacctcatcatgatgtcagaggaccatgtggagggctgagtgtgatggctcacatctgtaatcccaacactttgggagacccaggcagaaggactgcttgaggccaggactttgagaacaacctgggcaagatagcaagaccccatctgtacaaaaaaaaattaaggtaaaattttaaaagatgattgtaacaaagcaagatcatgtctatctgtctgcctagccagagagctgtgggaaacagaaagaaacagtatcacagcctcaccatcttacctccacccctggtgctgaacttggcacatatattaaaggttctccaacgtttgtggactgataaatgatttttttaaggcatgtggtataatgtaagagtggttttgtttaataatcttactacatcaaacctatctgtgacacaacagatgtcaggaacaagtcgggggtgtcaacgtcaccaccatcaatgtacaccgaccaagaaagatgagggaagtattagaaaagtccaaattataactacatcaaaagatatgaaaaatctcagagaacctacaattacatagcgagttacaaaacacatgagcaagcctctttcgatgtgattgaatcaaacatttcccaaatgccagcgacaagcatctgtatcagcagctagctagccaccatctggcctgtttctgttaaggtccctgctaaaaatggtttttacatgtttaaaggattgtgaacaacagcaaagaagaacatgtgactgagatcacctggcccctaaagccaaagacatttatagaaaggtttgcccatgcctgacaataataggataaaggaatcctgctcaccatggcaagaataacgttaaatacttaaggataaattaaataaaaatatgtgtgacctttatgaagaaaacgataaaatattactgagggacataaaaaggatttgaaaaaccaaagaaacagaggatactcttcgataggaaaggtactgtaagaatattcattttccaattaacataatctacacagatttaataaaaatccattaatacccccccaacaggtcagaggagcttgctaaaaaatcctctagaagaataagcaagggccaggcatggtggctcatgcctctaatcccaacagttttgggaggtggaagcaggtggatcacctgagctctggagtttgagaccagcctgggtaacatggcaaaaccctatctctaccaaaaatacaaaaaattagctgggtgtggtggcatgcacctgtggtctcagcaactcgggaggctgagatggatcacttgagcctgggaggtagagtttgcagtgagccaagatcatgccgcttcactacagcctgggtggcagagtgagaccccatctcaaaataacaacaataataataagcaaggatagccacaaatatttgagaaataggaggagtgtggtcagtgagataagaaccctaatgtaaagttgtaataaacagaagttcaacaagtatgaaaacaaagtaactattagtcattaaaaaaaaaacccaaaaactgatgtacatatgatatggcagcacttcaaatcataaaaccaactatacatgccaagacaattggttaccaccaagtaacaaaatccagaaaaagtaagacctaacgtctacattttaacattgttaagaaagcacagaaatatttattgacatggaaagatgtttaccctgttatatatgtgttattttttaacttgcctttttacataacacagggtgaacatctttccataaagtgaaacaagccagtcacagaaggacaaatactgcatgattccacttacgtgaggcgtctaaaatagtcaaatgcagaagcagagtaggatggtggattccagggacttgggggggcggtcaatggagaactgacttcaacaggttaaaggttttaggttgccaggtacggtggctcacgcctgtaatcccagcacttcgggaggccaaggcaggaggactgcctgaggtcgggagttcaagaccagcctggccaacatggtgaaaacccgtctctaccaaaaatacaaaagttagctcagcgtggtggtgcacgcctataagcccaactacttaggaggctgaggcacaagaatcacttgaacccaggaggcggaggttgcagtaagccgagattgcaccactacactccagcctgggcgacagagcaagactctgtctcaaaaaaaaaaaaagtttcagttacacaacatgagcaaattctagagatctgctggaccacactgtgcctataattaacaatacgtcggtcaggcatggtggctcatgcacgcctataatcttagtactctgggaggctaagagtgggacgattgcttgaggccaagagttcaagatcagcctgggcaacatagtaagattccatctctacaaaaaatgaaatttttttaaattagccagaaaacaaaacaataccatattgtacactcaaaaagttgtcggctgggcctgtaatcctagcactttgggaggccaaggtgggcagattacctgaggtcaggagttcgaaaccagcctggccaacatggtgaaacccatctctactaaaaatataaaaaatagccaggcgtggtggagcatgcctgtaatcccagccacttggtaggctgagataggagacacacttgaacccaggaggcagaggttgcagtaagccaagatcccaccacggcactccagtctgggtgacagggtgagactctgtctcgaggaaaaaaaaaaaaaagttgttaataaggtagatctcgtgttaaatgttcttatcataataaaaataaaaaaataaaaagaatggtagaagatactagttttgagtgaaaaaagttatttcataagtgaaaagaattaaaagcaatatatataatgaaaaagatagtatgtacagcattaacccactgtgtatgtgtaaagtatgtggccatgtatacacacaccaaaatgttaaccaaaatgttgagtgatagaaacacaaatgacttattttcctgtttttactcctctatattttctaaactaacttaactacaaaagatgggcccaatttcacccctaagagcctcatggtgtccacattagcaccagttcttccttactcctcagactcaagtccaggggaaaggctggttccccttacagcatctaccccctttacaatgtaatgcaagcaaatcaattcagtcctttctgctgtgagctcaggatacagcagtgcggaataatgtcctcatgtttaaagttctaaaataactttgggtttcagaagagagtggagaaaagccaaggtgctacaaattatacttggtatctagatttcttaaagctccctgcagccaaagttaaaaatcactaccttaaaggaagcaggaaatcgctacagtctcaaaaaaaaaaaaaaaaaaaaagtcgcctggaaataaatgtaaacctgacagataaaaaaaatcagccatctggaaaattctgttatgaggaagtagaaaagtaaaataaaatatttagacgtgtaacaaatcttccaattccctaaggactgaatcactagctctccacccaccaacaatcacgcacaaatgcagaagcttttaatcagtacttgtttcatcagctattcagcctgtaatgatttcttttgaacttcattttatccgaccatctctccctgtccaggaaacagagtcacccctctcactgtggcttagcagggccacctgaaggagaaatgtgatggcactgtccagaagttttcagagctgagctattcgtggagttaaataccaaaaccttctgtgtttctcgaaagaaccaccaaatcctaagaaaaacctgtcctttcatgatcagcacctagcagagtgagcaggtaacacagaaaccctccaatggctgaatgaattaatcactaatagtctgcccaaagagtagaatccccctatgtaaaattcatctttaaggctgggcacagtgactcccaacgctttgggaggcctagttgggaagattgcttgaggccaagagttcgagatcagcctgagcaacatagcgagactctgactctacaaaaaataaaacataaaattcatctttatattcccagctcctagtacagaatagacagatgctctttacaaggaagtacacagggcggggggtggggcggtgtggagaagatagatgttccataaatgctaatgaaatttacatttactccaagtagacggcactgaataaatactatatcagaaatataaatccatggcaaatccatcatttgctctagacaaaaacccacacttctccaaaaggatacgagagagaggaagagccagaataagaatcagtggctcatgtgcttaagactcacatgggaagcttatttaaaatatacacttctgggccaggcacggtggatcacacctgcaatcccagcactttgggaggctgaggcaggcggatcgcttgagcccaggagttcaagaccagcctgggcaacgtgacgaaaccccatttctaccaaaaaaaaaaaacagaaaaattagccaggcatggtggtatccgcctgtagtcccagttatttaggagactgaggtgggaggatggcttgagtccagaaggtaaaggttgcagtgagctgagactgcacgactacactccagcccaggcaacagagtcagactctgtctcaaaaaaaaaaaaaaaaagacagatttctttcacacaaatacatgtaagacaaaaatttgacactgttttatttataacagccccaaactagaaacatccaaagagccatcaagaggtggacgggtaagcaaatcatggtgggtccatcaaaaggcatgctagttagcaacaaaccagagagcgtctgctgacgtgcccgacagcacaagggagctgcacagacatttcgttaaagcagccagacacgagacatgcagtctgattctcaaaagacaaaccattctacgggaagcggagagtggttacctagggcaagaatggaggaaagggctccccagggaaaggatggaacctttggaatgatagaaatctactgttttgactgtgattctggtggctccatttggatgtatatccacttgctctatgtaaacactatcgcaataaaattgactttagaagactaaaagaattaaaaaaccctgtaatcccaccaattttaaaaatgtcccctcctcatattctaatcctatagacctaccttgggggcttgggaacctgtatttttgtttgtttgtttgttgagatggagtcttgctccgtcgcccaggctggagtgcagtggtgcagtctcagctcactgcaacctccacctcccgggttcaaacaactctctgcctcagcctcccaagcagctgggattacaggtgtgccccaccacacccggctaatttttgtatttttagtagagacagggtttcaccatcttggccaggctggtcttgaactcctgacctcgtgatccacctgccttggcctcccaaagtgctgggattacaggcatgagccaccgcacccggccaggaacctgtatttttaacaaatgcacaaatattctcatgctagaggtcctcagatcacccacaccttgggataggcaatcttggctgggaaaaagctattgtctgcacttctttaaaccaatccagacaggggaagaatatgactaagaaggagtgccctctgggataaggacactcaaaacctcagcctgccaagtgctactttggttctcactaagacacaagagctttcagggccggctaggttcaatgatgaagcacatttcaaaagccaatccatggctctttgcttaaatcccattaaggggattataatcaaactgtggctgctccattaagttctgttaaatgctaacatttgacctaaatgcttttaattcaagtcagaaaagactgttggaacatatgccctcaacttgtaggtgtggtgagggctagttttgaatgaaacgctctgaattctcaaaaaaaaaaaaaaaaaatcttcaacttgtatatgatcaacttcctttgaatgaaatgacttaactggttacctaatacacagagtccgacttcagggagtttgcaattctgatgctgatcctagctataattattccatttaaagctccaagcagcaacgaatgaacttgtaagcagtggtgattatttgatcttgtgatgacaagtatgctcacagcatgtgactgaatttaaaaaaaaaataacaatcatcctgcagtcttctccaaaacactgcaggaactcttgatcttgtttgtttgtttgtttgtttgtttgtcttttttgagacacagtctggctctggcacccaggttggagtacagtcaagcaatcgcagctcactgcaacctcccacctcagcctcctgagtagctgtgaccacaggcatgcgccactatgcccagcaaatgtttgtattttttgtagagacagggtctacttgttgcccaggctggtctcgaactcctgagctcaagcaatcctcccgcctcagcctctcaaagtgctgggatcacaggcatgagccaccatgcctagccagcgctcatttttcaaaccgcaagtcagtacctactagtaggtcatgaaattaaattagtggatcttgaccagaatttttaaaacaatggcatttgacagaacaaaaaacttcagagcatatctcaaaagacaggggtaaccgagagtgtcaaggtaaaatgcttcatgctgtgggtcaggggaaaagagtctgcaagtcactgatggaaaaactctgcacactgacatgaaaggcatgttccaagtgcccgacttaaatcagattatttactgaccttaaactaacatgcccatagaaatattgtgccaaagtgagaaagcggtataagatgatggcactgatgacaaaatatcatcatattcccctgccacaatgatggagggggtacccagaattgcagcaccagggtggccttataattaattacaataatctaccagagccctaaaccaaactacccccaatgactgcaatggaaggaatctcctttgcaccctaatgtgccatctcagccttctgtcactgtctcagtttgtggacttaattcttttaagagttggaaatgttttaaaggaagccagataaaacctggatttctgagagggaacataggtaccactgccaagttccatctcagaaaccagtttccatctgtagcgagccccaggagtaatgatcccttagaggccactcccagggccccaagaggggtcctgacagtagcaaccctgctctgactgtagaaaaaaagggtccctgggcaaacactgtactagttagaaataatctaaaaatgggttctcaggtcctcaccagtgggccagagaggatgcgatgccactggataaacgtgggaaattttcctgaaacatccatggggtgagttgggtggggaggatcattcctaactgacagcaaatagtttatggcacataaagtaaaatgcacaactgacagaatgaaacaagatgttgaagaatgggctctgcctacagaagatcccttcagtccagcccaaagacttagtcccagaagctctggtacagacaagctctagtcccaaatgcaacactaaatcctaaaaaagctcctgagtccagcctgagacacgtcattttgctgccatcgaattatgcatgagccatgaaaggtgatggtcatggtatctaggtgacaagacgataactcatttgcctgcttgttcagaagagcgatggagtctgagaaagtaaaatgtcagagtggtgtatgctttgtttgtttgggggtttaagatacaaagtcatccgcagtctttctttttctaacctaatgctatagcaaacagatgctacagcgcctactgtacctggtatctttcagcagaagttttctttccaaaactttatttaaataaaattataacaagaccatcttaagcctcgtcatcctggccatttctcctcagtgccaggtgctgcccacactgcccacgctgacctccagagttcccaggtctgggctcaagagacctcctcctccagggagcactcctgggtcagctgtccgtcttctgtgtttccatggttcccagcttcctgtccgctccccaccagaatgagatggcagcagggacacagtgtccaatgcataaaaggcattcaaatacttggggaaatccctgactcgttcagggaaatcttgtggctgggacgtgaaaggggaaagggaggggcagtatagcaaaaagtgcagcctgcatgacaaaattaaaatctgaatgtacattttagcaaactaaagcagaacaaagatgagttttattgcatttatttctactacgtgatttaacacatcactttttgcacacatggtgctttttatttcaacactatttaaaatgtattaatcatcagtcatcacaggagccactgaaaagctaattttatatggaattttaacaacaagataaaaacatgtgcataatgaactatcaagtcccaggcacaaacatggtttcacttagcccttataaaaattctgggaggggttgttattctctccatttcacagatgagaaactggagcacagagaggttgatttatctctgcaaaaaagctcagggccaatgttgtgggtccaacaatcattctggaagacaaacgttgttcgtgttaccttccaagctaagagaacgagactctgaagaaaaggccaaaagaccagaataggcctgagaaggtcatatctaaaagtcattctgaaggaagctgaggaaaatttgtgagttactttcagggaatagaaagaatgctttcttctcttccaggtctccagatgccttttgtcatttgatgctccccctggctcacccaatacaaaaatcttgggagcctggataacttccaggagatggctgtgccctgctgattcagtcccactgtgtctgggatgcctgctccatcctctttccagcacagtccctgaagaggaagcctcagtagggcacttggtcacctccagctactgttgccagagctgcccctgctgggagaaggcaggctcaggtgctgggagaagcatctcaagtaactcaacggactcaccagccctctctgtgatctgctcttcagaccatgtcattctccaaggaccaaagccaaatttccttctttcacctgcagagaaagatccagctccactttgcctctatttcctaactacccaattacgcctgcttggttttgctggactttggcccatttattcagtcctctcaacaccaaccactttcccggtctcatctggaagacattccatttgcaaatctcttgtgcagtactgtttctccccaccacaccataccccctgctccccactagtccagtataccaagagttcctcttccctgcagactctcccaagataaggaaaagggagctctgagggattcacctgctctaatagattacctaagggctgaagagtgggtttgcctaaactgcactgcaattatctggggctgggacactaattcttccccaggttaacaccacatacgtggtgatcaaaattattgcaaagcttttccctgatcttcaataaatgggaggctttaaatattccatgcctgtatgttatacactctttttcctgcacaggagtgtgttcttcctaagcaattcattaaaaattatattcattaaatacagagactgcaatcacttagaattgtatgctacagatgtcttgcttttttctggtatctgaacctgacattttttaataacccaaagaccttaaaagaattaaaaatatatctgcactcagctataagacactctagctctccatgaagtttgtttcacttatattcctttttggttgtttacttacttttcatcagacttctgaaactctgcatagaaggaaaacataggctgggcacggtggctcacacatgtaacccctgcactttgggaggccaagacggatggattacctgaggtcaggagtttgagaccagcctgctcaacatggtgaaaccccatctctactaaaaatagaaaaaaagtagccaggcgtggtggcaggcacctgtaatcccagctatttgggagtctgaggcgggagagttgcttgaacctgggaggcggagattgcagtgagccgagatcgcaccattgcactccagcctgggtgacagagcgagactccatctcaaaaaaaaaaaaaaaaaaggaaaacataaaagaacacacagcagagctttggcaatcctggcactagattggactctgaaaataagtaatttacttacatcgtttttactttatttactctggaaagtaaataagcacctgaaaaacacagaaattttactcgctgcagatgaagtttttattgctattctctctcacatacctaagggcggtgccttctaagaagtgcataaatgttaatgttcagtttttgatatttaaattatgtctgacagcactaagaaaccctttggagattttctagtaatgcagctgtgcaaaactgagaacttctcacccacctacacaggcacagtcacacacacacaggcgcgcacacacacagaaacagacatatatgtagaaaatcagaaacatcaccagagatacaaacactcagatactcacatggaaacagatacacgcagacccaaatgcacacagacacaaacagatagtaatcaatctgtatatcctcacaactcattccccaaagcagaaccgccaaatggccttaccttcaaagtgaaactccacccttccacagaaatgtcctctaatcagtgcgtcacccaccacttctgtgccggtgtctgtgcaaccctgcgattgtcctggtactcagcatgagacgctctcaggtgctgaaggaatttcagcttttataacccacacaggctggccaaaattgtataaccgcaccacctcattagaaatgctatttgtgttacacaacagccaccacccggttacaaacagttactgcatgcctctattatggtttccttaacatcaatctgtagcaggtttctccatggcaggctggatagtctattgtagaaaccaagcagctgctgagaatacgtctcaaacctgcactaagaaggaaaattaaaacctatctttgtaaacccttcagttcagatgaataagtccacccatgctgcttccagctcagtgaaaagggagattaattttactacctggtaagtttccatttccccaatcagggcccaaagacaattgttttcaaagctcaaaaaatttcagatctcaaggtaggagttcatcattaaaaggtaggcaaagccaacaagtaactgtcacattggagagctgactgctggggtccagttcaacgtggcatccagcaggcaggtctccactgattcctactgaacagtggaagtacccatgaagacacaaaagtgatgcatgcacactgacagtctgacatcaggactaggaaagaagtcacacctgtggccagactttgcccttcccagtcctgactccaagccagggcctaccaggaacctgggcagtgggcaccctctgccctgtggaatatgcaaatacctgcctccatctccctaacaccagactgcccttcccaaatccagaaagggaactcgaggctcagatgacaaacagccaggcagaagaggcatcgaccatcagcaagggacatcttagaagatgggagtccctgagataaagacagaaaaagaaccaggacaattcctggagaaaagcagctgtaagtattcctcattcacagaaactttgaggagctcagcagtgggataagaggatgacaccacctgaccagaagtgacaccttagcagaaactggggagaaggttgggagccaggtgcttcaactgctcagggcaggagacccaccaccacaagcgcccagaacacaggtccgcacatgacacatccaacccatcaggtcaacacgcctaggggagccaagaacggtattcaggacatgctgtgaagactctaacatcagagaagatttgttgcaggagccaaaagaaaatttaaaacaaaaacaaaaacccacagttggaataaaggaagaaaaacattttttaagttggtatttttttaaaagaggaaacaagattgacaattatatggagaaaatggatcaaaaacaagacgctgaggtggggaagaacagtagggaaatgaagaaccagcactaactcagaagtaagccagagaaatggcatcacaaaagactgaaacggaggtgggtgacagacctgagaaactctgagagacaaggaaaactacagaaaggctaaggctattccgagacagagctgggcaggaaaaagcaaagaacaaggccaagctgtgactcatcagtgcctctcaagcagacttagaaacaaaaggggcaatgaagccagctatgctgtatgattccatttacacaaaacatccagagtaggcaaatccagaggcagaaagttcatcgatgattgcctggggctggggtggggatgggagtgactattcatgggttttaggattctctgcaggatgaaaaaaagtgctaaaattgtattgtggtgatggctgtacagctttgtgaataacagtatactaaaaaccactaaattgtatattttaagatgatgactatcatgatgtgtaatacacctcaataaaactttttcaaaaagaacaaatgaggtcgggtgtggtggctcacacctgtaatcctagcactttgggaggctgaggcagacgatcacctaaggtcaggagtttgagaccagcctggccaacacagtgaaatcccatctctactaaacatacaaaaattagctgggtgtgatggcacgtgcctgtaatcccagctacttgtgaggctgagggcaggagaatcgcttgaacctgggaggcagaggttgcagtgagcgaagattgcaccaccacactccagcctgggcgacagagcaagactctgactcaaaaaaaaaaaaaaaaaaaaaaaaagaacaaatggagcagacttcaataacctaatataaaagatgtagactaaaaaactattctgagattaagaaaaatctgagtaaagggactaaaagggcattctaggttcatgcaaaatcatatacttggacacatcctagcaaaataatttaaccacaggatgaaagaatcgtagacacatccagggaggagaaaatgtttggtttgcttaagtgttagcttgaattaagcttagcacctgggttgtccacagcagtattaaatgtcagaagacaataacacaaacacaaactgagggaaaggtcttaacaaggaattttatacccagataaggtgcccttcatgtgtgaaagccaaacaagatagttttagatgtgcatgagctcaaaagaaaaggagggaaagaaagcctgaagctatattccaaccaggttggaatatagaagtggaattcacagaggccactaactagtatacaagactgctaagcatggatgctaaaaccatcaagatagggacaaagctaaataatgagtgtaaacctggttataaaacgcaatgcataagccacattgctctctaaacatatgctatataagaaatgtaattaaataggccaggcgcagtggctcacacctgtaatcgcagcactttgggaggccaaggcaggtggatcacgaggtcaggagttcaagaccagcctgatcaacatggtgaaactccatctctactaaaaatacaaaaattagccaggcgtggtggcatgtacctgtaatcccagctactcaggaggctgaggcaggagaattgcttgaacccgggaggcgaaggttgcagggagccgaaattgtgccactgcactccaacctgggtgatagaacgagactcaaaaaaaaaggcctggcgcggtgactcatgcctgtaatcccagcactttgggaggccgaggcaggcggatcacaaggtcaagaaatccagaccaccctgtccaacatggtgaaaccccgtctctactaaaaacacaaaaattagctaggcgtggtgatgcgtgcctgtattcccagctacttaggaggctgaggcagtacaatcacttgaacccgggagatggagactgcagtcagccaagatagcgccactgcactccagcctggcaacacagcaagactccatcacaaaaataataataataaaattaaattaaataaaaaaagaaatgtaattaaataaagcagacagaaaagattacattaataaagactgaaaacagagagtaagaagatgctaaagcccttctcccaaacagaaagaatcataggccttaactatgacaattagagaaacgaggtttttttttatgtttttcacttaaaaccactattagaatttgaaacagaatacagactaaaacacagctagacctgtgagttaaacccatttaattaaaaatactcagattgcatcaaaaaataaatgccagccggatgcagtggctcacgtctgtaatcttagcactttgggaggctgaggtgggcagattacttggggtcaggagttcaagaccagcttagccaacatgatgaaaccccatctctactaaaaatacaaaaattagctgagtgtggtggcgcacacctgtagttttagctactcgggaggctgagacaggagaatcacttaaacgcaggaggcggaggttgcagtcagctgagattatgccactgcacaccagcctcagcgacagacagagactgtctcaaaaatagataaataaaaataaaataaatgccaacccccaagatagaccttaaagtgaaaaaaagtaacactaatgctgccttattattttttaaatgtcagacacagtggaattcatgccaaaaagtattaagcaggagaaaggatgtcattttacattgctaaaggataaaattcacaagaagaatatgatgtcagtctttacattctgaacattctttcactgaaataaagcccataatggctagaaatagagaagaaatgaccaacacttcataaacatatctctctccaagaagataggggtagggaggatatacaagcataggccccatgtccatattaattttattttgtattgatcacagaatctgaccaataaaatgaataaggctaatataatagatatcaaactttgcaccccatagaaaatagcttcattttcaatggctaaagagcatttatgaaaagtcaccatctatcatgccacaaggaaaatttcaaaccccatgaaaaaaggaacatttcagctgggtgcagtggctcatgcctgtaatcccagcactttaggaggccaaggcaggtggatcacctgaggtaaggagtttgagaccagcctggccaacatggtgaaatcccgtctctactaaaaatacaaacaattagccacgcgtggtggcgggcgcctgtagtcccagctactcggtaagctgaggcaggagaattgcttgaacctaggaggtggaggttgcagttgagccgagattgtgccattgcactccagcctgggtgacagagcaagactccatcacaaaaaaaaaaaaaaaaaagaaagaaagaaagaaagaaaccaaaaaggcataaaactcagtgtcaatttttgaataaaactcttagcacattacacatgttaagaaaaaagtcctcgaaaagaaccctgatctcataccaaaggcaatgagatacataacctgaatgacacccagaggggtgccctttaaagacagaaacaggagtctggtgggtgccattatagaagactgttccggaagttctagccaggacaataagaaaaagattttgtttgagcacggtggctcaggtctgtaatttcattgttttgggaggccagaaggatcacttcaggccagttcaagaccagccagggcaacgtaacaagacctactctctatttaaaaaaaaaattatttttttaattagctggacatggtggtgcatgcctgtggtcccagctactgggaaggctgaggtaggaggactggcttgactccatgagtttgaggctgcagtgaacaatgactacatctctgcaatccagcctgggcaacagagttaagaccctatctctaaaaagaagaaaaaagaatttgaaagctcaaataatggaaaagggaaagcaaaataattatttataggtaatgcatctgtctacccagaaaatgagttaaaacacacacacacacacacacacacacacacacacacacacaccctagaataagatacttcagaaagatagtaagttataaaatgaatatacaaaaaattcccatacatgagcactaactcgtgattcccctctctttaaagtaccgtataggttgggtgcgatggctcatgcctgtaatcctagcactttgggaggccaaggtaggagtaacacttgacctcaggggctcgagaccagcctgggaaacatagtgaagccctgtctctacaaaaaatacaaaaaaattagccgggtatgggggcagtgcctttagtcctagctacttgaagggttgaggtgggaggatcgcttgagcgtggaggtcgaggctgtagtgaacagagatggggccgctgtactccagcctgggtaacaatgtgagattctgtctgaaaaataatttttttttttaaaaaagtactgtatatatacatgtgcgattgagctttaaaaaaaaaaatggctatgcaccaagcagcttatggtggtaatctctataatataggggttacgggtgtttctttttgtgtttatctgcattcttaaaattttagttatatccctctccttatattaggaggaaaaattatcaatagctcaattcttagtatgtatgtatggttagaaaactcagggcagaaaatagggcaaaacaactaaaatgctaaatatggacaaatacaagaaaaaaacttttaattcttcagaaataattttgcatttgaaaatatctaatctgattaacataatctctgatttgttttccttttatgaataaaatctaaaatgtgtttttcttttaattccacatttggaatcatcatttctgtctttccagataaatgttagatattgacatttctgtgcccctgctgttgtaaaactgagtaaaacaacaaaagagattcaagattatcagctagacaaaacctactttgactctgtaataagacaagggggcagatgctagaaatgctaaaagcaaatgcattaacagcaccctctagtgttacgaaatctaatggcacttggtagaagaaacctaaatgtaagatttttaaaaacttcttctggaaaatttcaaacatacagaaaagtagacaaaatgaaaacacattttcatttcatattcaatttgcttccaattactgactgttcttactcttgtagcaacttttatatttcattaagaggtgtcagaggcaaccaggtatctctgtgggcccttctctgccattcgattagtaattcaactaataaaatccttggttttaagttgggcacacaaccaactaaattaactgaggcaacatttcccaggctcccttgcagctagatgcagccagccttagccaacggatatgggtgaaagtaagcatgccctcccctctcccttccctcttcttttttttttttttttttttttctgagacagagtttcactcttgttgcccaggctagagtgcaatggcgcgatcttggctcactgcaacctctgccttctgggttcaagcgattctcctgcctccgcctcccaagtagctgggattacaggcatgtgccaccatgcccggctaattttatatttttagtagagacggggtttctccatgttaatcaggctggtctcgaactcctgacctcaggtgatccacccaccttggcctcccaaagtgctgggattacaggcgtgagttactgcgcccggcctccttccctcttcttactggctgcaggaaccaccttggactatgtaaaagaatcaatactctaagaagccaagcatagtggcttatgcttataatcccagtgctttggggggcttgagtcaggagggtcacttgaggataggagtttgagaccatcctggacaacacagcaagactcccatctgtacaaaaaaattttttttctaattacctgggcatggtgaggtgtgcctgttatcccagctactcagtaggctgaggcaggaggatgggttgaacctaggagttcaacgttcagtgaactatgatcatgacactgcactcaagcctggatgacagagcgacactatctctaaaaattaattttaaaaataagaatcaatactctagaaattttaaagagggggatagattatgtgaggaaaaaactttgatggtcttatcccagcatgtcagagcagctaaaactataacctcaaaaaaaaaaaaaaagaaaagaaaaaaaacccaacaggctgagcgcagtggctcacacctgtaatcccagcactttgggaggccaaggcgggcagattacctgaggtcaggagttcaagaccagcctggccaacatggtgaaaccccatctctactaaaaatacaaaaattagccagacatggtggtgggcgcctgtaatcccagctactcgggaggctgaggcaggagaatcccctgaaaccggaatgcagaagttgcagtgagccaagatcgtcccactgcactccagcctgggcaacagagtgagactccatctcaaaaaaaaaaaaaaaaaacttattaaattggcttctttggcagacacttaaagcctggccactcaaaacctggccactcaaccataatctcaagccatgattcagaatgtgtgctgacaagcacataccacaattccagcaatgaagtaaaaacacttcatccaactctcaaagcaaatccactgtgaagactgtctgcacccttccagctcaagactcacattacagtgtgtcctagttagcaggctgcagtagaagggttagtggtaaagcatcactgcactggcatccgtgcccctcactggagaccatgcatggtgcagtatgtgcaggaaagtcattaaccagtgagccgaaaatgcctctgtaaaataagattgctgccctactcctgtagtttctgcacttctctttttagtactggaatgagtattctcagattaaatcttatttaaagcctagaggggagggggagaaatcacaccagtaggtggatggcatcattaaaatggaggtttaacattcttcactataaagttttaacatacattttccagaaataaaatagtccaactagtaaatgaaaaattctatgtatttcttagcaacaaaatacatttatctaattttctagcagtagctgcaaatgtttatttatcttttttttttgagaccgggttatgagactggctaatttttgtatttttggtagagatgaggtttcaccatgatgccaaggttggtctcaaactcctgagctcaagcaatcgacctgcctcggcctcccaaattgctgggattataggtgtgagccaccgcgcctggctgagtagctgcaaatgttacgctgtactataccatctctttactatttggttaccctaacacaatgctctgattttgaattaaagagaaagaaaaaaagatcatccaagagcaagaagggcaaaaatcaattactttaaataactttaaaatacaatttgatttttaagtttcattctttggattaaaaagctgtatgaaagggccaggtgtggtggctcatgcctgtaatcctagcactttgggaggccgaggtgggcagatcacctgaggtcaggagttcaagatcagcctgaccaacacagagaaacccgtctctactaaaaatacaaaaaaaaaaaaaattagctgggcatggtagcacatgcctgtaatcccagctactcaggaggctgaggcaggagaatcacttgaacccaggaggcagaggttgcagtgagccaagattgtgccattgcactccagcctgggcaacaagagcaaaactctgtctcaaaaaaaaaaaaaaatggtgtatgacatacctattaaaatggctagaacaaaaacagacaataccaagtgctgacaagttactggaactctcatactcttgggtgggtatgcaaaatggtacaactactttggaaaaaccatttggtcatttcttatcaagttaaacataagtttccataagacccagcaatactactcctgggcatctatggctgaatgaaaccttacgttcagacaagaacatgtacataaatgttaataatggctttattttttatttgtatttatttattttgagacaaggtctcactctgctacccagactggagtgccgtagtacaatcacggctcactgcagcctcaacctcccgggctcaagtgatcctcccatctcagcctcccaagtagatgggactataggtgtgcgctaccacacctggctaatttttctaatttttgtagagatgaggtttcgtcatgttgctcaggctcttgcccgggctcaagcaaacctcccgccttgacctccagatcactgggattacaggcgtgagtcaccatatcagctatttttatttttagacacagggtctctctctgtcacgtaggcaggattacagtggcaggctcatagctcattgcagcatcaaactcctgagctcaagcaatcctcccacctcagcctcataagtagagagaactacagatgtgtactgccatactcagctaattattttttattgtcattgtttttgtagagatgaggtctcgctatgttgcccaggctggtctcaaactcctgagctcaagagattctcccacctcagcctcccaaagtgctgggattacaactgtgagctatcatacctggcctctagcggctttatttataatagccaaaacctggaaacaacattcacctttaactagtaaacatcaactagtgaatatccacaaaccacatggcctatctctattaaaacacaattatcatttcacattcatcagataaggctagaataagagtttagtaatatgaagtattggcaagactgtgaataaacaggaattcctgtatcttgttgacagagaagaaaattggttcaaatacttgggagaaccactgctaatatttagttggttgaaactgtgtatgcactatgatccagcaaggccagttagcatacttcaccccagagaaacccacccagatgaagacagtcattctgttcattatgctatgtcaagaggagaatatctaagttatgctatgcttaatcaatgaaataaaatactgtagttaaaataaacgaactctagctacttggaccaacatttgggaacattttccagagtgattaagtaggttgtagcgcacgcgcacacgcacacacacaagatctactatttaaggttttaaatcacgcaatcattattatatgttggtttgtgaatatataagcatgtaacacaaaagtaaagacacggactgtaaaggtacctctgggaagaagagaaagagggagatgaggctagcagagaggacaaaccaggtatctgaaatgtttcaatttccttaaaaagcaaaaacaaaatacctgaagcaaaaatgacatgtttagatttattaggtctgggtatctagcaggtaagttttcattctttagttttctttatatttgaaatgtcacaattaaaagcaaatgtttaaccaaagactatctatctttaaaaggatatacagtctgaacacacaaaaactggtaaaagtggctgcctccagagatggaaactgggacaaggaccagacaggaaggaggcttattctccctgcctggcctgtcctcatgcacattctgattacacatccttttttttttttctttttcttttttttttttttttgagacggagtctcgctctgtcgcccaggctggagtgcggcggcacgatcttggctcactgcaacctgcacctcccaggttcaagcaattctccctataggcacgtgtcaccatgcccagctaattttttgtatttttagtagagacggggtttcaccttgttagccaggatggtctcgatctccctgacctcatgatccgcccaccttggcctcccaaagtgctgggattacaggcgtgagccaccacgcctggcctatctatttttttaattacaaataaattttacgccctctttatctccaatcccccagagtggggcctatctaaagcaagcttgtccagctctcggcccaggacagctgtgaatgcagcccaacacaaattcgtaactttcttaaaacatttgagattttttgcgatttttttaaagctcatcagctatcattagtgatagagtattttatgtgtggcccagggaagccaaaagattggacacccttgatctaaagtatttttatttcagataaggacaggccactgaacacatgactgagattccagccctgactgtgccattaatgatgggaggagatttaattttggggatgatttaaccccctccaagtatcacatcacttctaaaatattgtcttttatgaaaacacaaacatatccccctcagccagagaatctctaactaagccacagggagcgaaaagcagttctcatataaccctgataggaaaacttttggaatttgttcggacagttccacacagaccatctgcagtgattgcctcatagcctctgtgggtagagatgtacgtagacagttgcccttatgcaaggcagcatgaggtgagagaagggcaggaagttgggggagtgcttatctgatcacttgttttcttaatgaactaagaagcagaggtcatggctgagagtaaaaaggctgggaatgggattggacagaagtgactatggaagaagaaaaacgatgagaaaaatgatattattttaaaaaaaaaaatcaaagtccagctgagcccagaactcataatatgaaatagagaaagtcaccttgttatctggtttctctccagcagagttcaaccacccccgccccaaaaaaacagaatagttaagaccagggcactgagggagcttgacaagttctggagacagctcagagagggaggagaccatgttagtaagatggcagccacgtgatttcctgtggcgtccatagcaggtaaaaaggactggggaggcaagaggaagccagagagcaccacagagctggagcaccaggaccaatgaaggggaggaatgagagctagggaggacagggtgtgtagacacactcccagctcaggatcccaaagtgctgtctgggagacgactgggccttggagagctgatataaactggaagtaaaactacctgcaaaaggtaaaaggtcagtgaggtcccgtggccggataagccaatgactgagagatgatgctagaagacacagtggaaagaaatgtggcaggccaggagccaacattcaaggggcataaagaaaggtcaagaagttgctagatggcctggcgcagtggttcacacctgtaatcccagcactttgggaggtcgaggcaatggatcacctgaggtcaggagttcgagatcagccttgccaacatggtaaaaccccatctctactaaaaatacaaaattagccgggtgtggtggcatgcacctgtaatcccagctactcagggggctgaggcaggagaatcgcttagaaccagggaggcggaggttgcaagtgagccaagataacgccactgcactccagcctgggtgacagagcaagactatctcaaaaaaagttgccagatgatggcaaagaggaaaaaggcttcaaaactaacagtggtagttgaattaaggctggaggacacagcctgctattccctctacctggaaatactgcaacacctggagaatgtaaatatcaattcctcagcaaatcctttccacatctcccaaaatccaaaccactcacttcactctttgctattctcccaaagcaaggagcacaattcatgccaaatgtccttcgttatccaaagttatgcttttctcaagttcatgaagccaaccagggatccacgttttctgggtctatccagttcctaaattgtgatcagcagaaaataagcgaagggtatatacctaaagatgtatccagcaagccaccaagtcaggaaagcaggtgctctggcatgctggcttcaggaccccttagtcacagccacttaaaagtagtctgcatggctataagaatccctaaggctgccataactcctttaatatgattctctgtgttgccaataggaatatgaccatatgtaagctttcttattaaaaaaaaaaaatgtaaaaaatctgaccaggcacggtggctcacgcctataattccagcagtttgggaggccaagatgggtggatcacttgaggccaggagttcaagaccagcctgcccaacatggtgaaaactcgtctctactaaaaatataaaaattagccaggcatgatggcacacacctgtagtcccagctactcctgaggctgaggcaccagaatcacttgaacccagaaggcggaggttgcagtgagctgagatcgtgccactgcactccagcctgggtgacatagtgagactctgtctcaaaaaaagcaaaaaatcaaaaaggcagaaataaaataaaatgtaccatttataatttacacaacaaattgtaattgtaaatttagtaaataatttttaacatcccgttaacatgcaagcactttggatatactgctagtgggagtaataattgccattaacttatttttttttttttgagatagggtctcactctgtcgccgaagctggagtgcagtggcacaatcatgactcactgcagccttgaccttcctgggctcaggtgatcctcccacctcagcctcccaagtagctgggattgtaggcacatactaatttttctatttttggtagagatggggtctccccacgttgccctggctggtcttgaactcctgggctcaagcaatccgcccacatcagcctcccaaagtgctgggattataggcgtgaaccactgcacccagacataacatttttagatggtaatttaacatcaccaatcaaaggctctaaaaatacacatagcctttgacctaacaattttactcttaaggaatttatcctagcaaaataattaaaacaggcttaaatttttcattttgtgagtgttcattaaaataatgcttaagagtaatccaaaaccggaggggaaaatattaatgcctaaaatagaggactggttggtacaattgtgggcacattcttatatgagcatattacagagattaaaacatgggtgactgacgtggcaacgtaaggagtgcattattaagctgagaaaaagacaggcttacaaaacaaacctgataatcccatttcagtgtgtgcacacatgcagaaaatgaagggacaccaaaaaattagccaggtgtggtagcacactcctgcagtcccagctactcaggaggctgaggcaggaggatcccctgcacccgggaggtagagttgcagtgagatcgcaccactgcatcccagcctgggtgatgagagcaagactctgtctcaaaaaaaaaaaaaagaagaaaagaaaaaaaggaaggaagagaagagtagaagagaagggaaaagaagaaaaaaaaaaagaaaggaaaatggaggaaaacaccaaaatagtacatgattatctccagatgatgggattatatgtggttttttttccccttatttttctacagtgtacatatgtcactttcataattcttaaaagcttgagccattatctaaggacaacactgaaataaatatacaggtaagacaaactagaagagaaattctggcagtcaacaccagtgctgagaaaaaacaccctattgatatagtcagtgtgctcccggagagagcgctgggagggctagagtttcctggtaaccaggagcctaaatttatcattcctaagggcttgctgatggcacctgagtaacttaggaaaccaaaggtgtggtcaaaaggtaagcgctcttcatactcggtaaacctactgtgttcaggggttcctgattttccttaaatcctttttattcttggatctcaactcttccaagggctgtctttatctaacattagttactatacttcttcacatttcctagatcttctttatttgaaaaagaaatgagactcattcattgcaaccaaactttaacttgtcaaaattataaactggctgggcccagtggctcacatttgtaatcccagtactttgggaggccaaggcaggcgtatcacttgagcccagaagttcgagaccagcctgggtaacacagcaaaaccccgtctctacaaaaaattagccaggtatggtggtgcatgcttgtagtcccagctaccaggcaagctgaagaggaagcatcaccctcagccgggcgcggtggctcaagcctgtaatcccagcactttgggaggccaagggaggcagatcacttgaggtcaggagttggagaccagtgtggccaatgtggagaaacaccatctctactaagaatacaaaaattagctgagcgtggtggcatgcgcctgtaattccagctactcaggaggctggggcaggagaattgcttgaacctgggaggcagaggttaaagtgacccaagattgtgccactgcactccaccctgggtgactgagtgagactccatctcaaaaaaaaaaaaaaaaagggaagatcaggagatcaaggctgcggtgagctataatcataccaccatactccagcttggataacagagggagaccctgtcccctccaaaaaaataaaattataagctatagaacgtatttgtgattcttgggtaaaaaagaaaaatatacatatagactggggtagggggcagcaggggagatcaatttacttgttgaactggttcatgtgcattttccaggcaacagaaaatctaaatttgaaaggaaaaaggtgaggaaggggaagctttagtagcatcattcaagtgtgagtatgtattattacatagtccctgaaatagaaggggcttacattatgaaatactgaaaaatccaagagcttggaagttgaaaacatattgctcagtggtaagtaaagctatgtggggtttaaactgtgctatccaatgcgggagccaccagccccaggtggctactgagcatcttaaacgtgttggtccaactggtatgtgctatgaatgtaacatatacaatagacttcaaagggttgctatgaaaataaaaaagaatgcaaatatctcattaataactttatattgattgtgttgaaatactatttttaatatatcagcttataaaatatattactaaaattaattgttcttgttttcctttaatgtagctacctcaaaattacatatgtgacttccattataatggtattaggcactgctagtctaaaatacgtggataccagggaaagagaaaatgctatttcagtgcacacaaccagggtaatcataagatcacatcctatggatgtgtaaacttttgatagttttacacacacacacacacacacacacacacacacacacacacacacacaggcatggccatctttatccaaacatcaaagacaaccctattattaatatcctacacagtcagctgggcagattacatgatggggagcaggtgccataacctaattttccacacacagaactgagaggagggaaggaagcagatataaaagagaccaaagcagaaatccagaagcagaatccagtgctaacgagaagcacaagatgaaaggtcagaagggctggaggcaggggctctttgagggaagcccagaaccagtacaagaaatctaaataaacacagggcccatccaaaggtaaacattactcaaatccagaaaggctttattgctattgatctgcaagttccagtttatggcaaacctaaaacaaaataatatgtgtatttaaaaaggattatcattagaagtcatgggacaaatttattgatgagttttttttttaacaccatacagaaaaatcagcaaacaacttagacaatttataaacagctggtcttaatccaacactaacatgttgatttttcaaaataaccagttgaaaaggccagacttgttctaatttgcttggaatctctttcatagtaactgttacacaactgttccatcttccttccttaccttcttatgtaagctctgtaatcaccatcagtgtttacataggtttgtgaaaccacccaatttctccagtaaatatttaattctctttgctactgatcaaaccataagcaacacaacatttttatacgacatgtttggtaatgagaaaatgagacattgacgtcaacagcacaaagtctataaaccaaaaacaccaggatttcccgatacataggcctcttggaaatcaggcaccaataaaatagaaaattctcttcactgctccaagtgtttgatccagtttataactgagttccgcagcatctgtggtggttctagcaaatgctaaaatacccttcaaccagaaccatgcacccagtctgcaggcttcaggcaccaagcagaatgggtgttctcagctatgaaagccaggcactcaacaatcacctgtatgttattaatgacaaaaacgaaaggtacgagcaagcctcctcttttctcagtttagtaagaccgtgatattttaggatctgtactgatcatctcaaggcaaatggaatgacaccaaccatccaactagatccctgactgcccttggtgggctggagcaaggagatggagatacattatgctgaggctctttcccatctgattgtacagtccggacacctagcaaatcagagaaaacacatacaaccatagagctgggcaggagagctcaaggacactggaactccaggctggaagttgtcaggaatgacttttaggaagtgagattagggttagccttgaaagatggcgggaatcccaagagagatgccactacggaggtccagaggtaggtggcatatgatgcgtcttttgggcgctgaacacaacagcctaaccccagcacctggaggtcagaggacagggaggcaaaggaagaaaaccctttgtggagtcaaagtagccttgaaaagcaaactcaacacagaacggcttcatgcaacatgagtttctgggcaggcgaggagagcagtcgtccaccacaggataatctcaaaatggggatcaagaagctactgtgttaatccaaggaaaatgaccttggcaactgcaatggtgaaaatgccaatgagaaaaatggatgaactaagggagtgatttcaaagaaagacctggtattaaaggtgacctctaagaaaagagccaggtgtcctcttccttcagaactaagaaaacaggcttgacaaggtaaatcattaaaaaggtcaggatgtgtatttttcttttttttttttgagacgacgtctgtctctgtcacccaggctggagcacgatggcatgatctcggctcactgcaacctcagcctcctgaggtcatgcaattctcctgcctcagcctccagagtagctagcaatacaggtgtgcgccaccatgcctggctaatttttgtatttttagtagagacggggtttcaccagccatgttggccaggctggtctcgaactcctgacctcatgatccacccaccttggcctcccaaagtgctgggattacaggtgtgagccactgtgcccggccttgttttgtttttagtagtaagtagagacttctttattagaagtgttttttggttttttttgttgttgtcattgttttgttttgagacagagtttccctcttgttacccaggctggagtacaatggcacaatctcggctcactgcaacctcctgcctcccaggttcaagcgattctcctacctcagcctcccgaatagctgggattacaggtatgcgccaccatgcctggctaattttttgtacttttaatagagacagggtttctccatgttgtacaggctggtcttgaactccggacctcaggtgatccgcccgcctcagcttcccaaagtgctgggattccaggcatgagccactacacccagcctttattagaagtcttaaaatttttttaaaaggagtgatcccctctaagtatttgtaaaagctcttataagtgtacacagaaagtaaattttactgcacataaaatttttttaaaacaacactgacataacattttacatccaccatactgaataaatttagttttaacaagtcaatgtatctgacagcatcctttttttttttttttttttcttgaggcagggtctcactctgccacccaggctagagtgcgctggcacaatcagagctcactaaatccttgaactcctgggctcaagtgatcctcctgtttcagtctccagagtagctgggactataggcgtgcaccaccacatccagaagcagagtatctgagagaatgtatcggcagatgtgaaacacttgcggcttttctgaaggataatttacctatacatgtatcaaattttaaaaggtcatgcactgtgcccatcactactactgctaagatgttttccccaagaagaaatttgattgcagtattgcttataatagcaaaaaattaaaaataatcaaaatgttcatcaagctttggggataagggaaacaacagaaggaggaaaaaaagaatgctcctgagtaatgtacatgtggttagtctcattaattaaactgcagagaatgcttgaaaaggggtgaggaaacaattcttaaatctctttccactccaggttcctcacgtataaacctcacggagggccaagagcaggaggtactcaacaaatttttgctgataataaagtcaaaagcatgaaagaaaactgaaaatatttacctcctactttgtaattaatataagtggcaagactgtgcctgtttattttctagtttaatctacttgcgtggaatttggcctaaagaagtctattaccttatcattagcattaacctaacaattcattattccaaaggttgtgcatttagaccgttctcaacacgtaaaaaacgtacaaaggtaaggtcaagtacaaaagggttctaatgctacagagctgccagcccaattctaccatgaagcataactagccaggcatggtggctgaagcctataatcccagcactttgggaggtagaggcaggaggatcgcttgagcccaggagttggaaaccagcctagataatatagtgagaccccatctctaagaaaaaaaaatttaaaaattagccaggcaccatggctcacgtctgtagtcccagctacttgggaagctgaggtagaaggatcacataagcccagtaggccaaggctgccacgagctgtgatcgtgccactgcactccaccctgggtgatagagcaagaacctgtttcagaaaaagtaagaaaaggaaaaggaaacacaactggagattgtgttttacacgcacctaagtgatgtggcgtagacctgtccatatgctttccattacaattcgctgagttacatttgcttatgcaccaaggtccaagttcaaagccgtatgagaagtccccgttagtggagtcaagacctagctggagaaaagcaaatggtaaattaaaagtaataacaaacctagcaggaggtactctgcatgaatggagtctatttttcacccagccatgcccaatcctagaatttgctctattactacttcatttttatggactgcctccaaggccccagcctgtctctaggcagggtcacaaactgcaccctcaattctttaaaaatccactctccatttctacaaagtattttgaaagatagtattttagaacacctataaaaaaacttttcagccaggcacagtggctcacacctgtaaccccagcactttggtaggtcaaggcaggcaggtcacttaagcccaggagttcgagaccagcctgagcaatagggtggtctctacaaaacacacacacacacacacacacacacacacacacaaattagccaagtgtggtggtgcacacctgtgatcccagctactcaggagactgagaggtggagaatcacctgagcccaggaggttgaggttgcagtgagctgtgcaaccgcactccagcttggatgacagagtgagactctgtctcaaaaataaataaataaataaaaagcaattttgggccaggcacggtggttcacacctgtagggaggctgggatgggaggatcacttgaggccaggagttcaagaccagcctgggcaacatagtgaaaccttgtctctacaaaaaaaaaaaaaaaaaaattatctcgtcgtggtggcacacacctgtagtcacagctactcaggaggctgaggcaggaggattccttgagcccaggaggtcaaggctgcagtgagccatgactgtgccactgcagtcctacttgggcaacagagcaacacgccatctcaaaacaaaagcaaaaaaagtgatttgcactcagttgggatttctccattgataacttttaaactccatattccctagcacagggtctttgatttaaaaaaaataaataaataagtcactttctgttaaagcctcttaaaaatgtactagcacacggggagggtgcttctcaaaaagccggtcacattctgtttctcaaactgggatatgagcaggtacacagatgtttcttttactatttattaaacggctatgttttatccactcttgtacctatgcatatgttccacaataaagggaacccagagcctgactcagtggctgtcttgggaacagccatcccagccccagccatgagcctggccctcccttgtgaagaaaaacgtgcaaggcaaccaacagtttagccagattttcactggaaaatccttatgttgagacatcaacttttaccatttgttcttgggcaagttagcatcaacaatcgccaacggccccaagttaaatagcacacaaatgccatcagactggtaccagtccagccttcaaggaaccattaatgagtcttttttttttttttaattttggaaactaaacactggtcttgtgctatttgggaaaaaatactcactttaaattattagaacgtgaatgaagaaattgatgtctttccctttctaaaacattttgcatgcaaggaaaaaaaaagtagtaatttatttctcaaaataaaatctctacacataaatctatcttaagctatgtgggggtttttggggggttttttggggtttttttgttgttgttgttgttttaaatgagacagagtctcgctctatcagccaggctggagtgccgtggcgcaatcttggctcactacaacctccactcccgggttcaagcgattctcttgcctcagcctcccgagcagctgggattacaggtgcccgccaccatgcctggctaattttttgtatttttagtagagacacggtttcaccatgctggccaggctggtcttgaactcgaccttaggtgatccacccgcctcggctcccaaagtgctgggattacaggcacaagccactatgccaagccttaagctatgtttatcagaaatttgcaatgtcagaagggaggcacaaaggtgacatccatcaatgtctagtcaagaggaataatgaaaagaacatgagaaaagaaaacaagagagacactttaaaagaatggcttactttcagttaagttataataacaaatacagttccttgaaaaatacaggttgtacaatatgtgtggttatgatttcacttttattaaaaggataattacatagtatgcatttgtgtacacagaacagggctggcaaggatacagatcaaactgctttgaagtggtggggggacataagaaaagatcgtgtgaccttctcaatttactaaacacaagtctgacaagctagaattatttttcaacatgtgtatgcttcttttgcaaatcctttaaaaaactattaattaaaaacggctccatgagggcaaagtgcaaattaacagaatgtcatttttagctacaaatcattggaaaattctgaatggggaagcgaaagtactatgactccttaaagacatgtttttggagagtatttttctaagctgagtggcaagatggctggaaggacttaactactgcacagaacaagtactgagaccaaaccacagaactgggtcagaggttttaatactgggaacatgcaaatacatttttgagaaaggaatctctgaggaaggagttaagaaggaatcacgatacaaacaaaaacaagactgagctatcagtaagcaaccttgaacttctggcagagcgctccgctgaatgcccctcccattcgtgggttccaccgcactctggaaacatgaaaactgtcctttgcacgcaaggctacggggctgagatcaaagcctgggcgctgcggcaggtcagaggaaacatcacttgggacacactcatggccacatgactttcccccatcaaggcccgctgaactctcaagaatctgttcacagtgcttctgttgcttcttaattaggatgtgcaaaagtacatactacatgctgtggtttccagacactgacttcatacagaaaacattcaacaaaaaactggggaagaaatactacagaattgccatctgtgtatcttactatgttatttaacatctaccactgactcaacatcatttccttaaaaagggatgttaactcttcaaaagcaggaaggagagaatgccagggccagtatcataacaggccagaacctttgaacagccaaatcattctatcaattcagtagatgccaaaaaggctgacaaaacacttcctcctgatttaaaaagcaaaaaccagccaggcgcggtggtttatgcctgtaatcccagcactttgggaggctgaggtgggtggatcacctgaggtcaggagttggtcagcctgaccaacatggagaaactccatctctactaaaaatacaaaattagccaggcatggtggcgcatgcctgtaattccagctactcgggaaggctgaggcaggagaatcgcttgaacccaggaggcggaggttgcggtgagccgagatcgcgcattgcactccagcctgggcaagaagagcgaaactccgtctcaaaaaataaaaaaaataataataataaaaataaataaaaagcaaaaaccaaatatcttcaatgcaaattaaaagatacttcctgaatatgacaaatatcttctgaaaacaagggcaaactcaaacactacatattcttcatgctttggcattttgttttttaagtttatttttaaccttatactacccttatatcctttatccttatactatcattcccaatgtttgtatttttttcaaggtcttacaaaagaggcacatgtatgcacttgaaaatcttgatgaaatgggcaattttggggggaaagctattttttcagtgtttttgtttttgtttttgagacggagtctcgctctgtcacctaggctggagtgcagtagcgtgatctcagctcactgcaacctccgcctccagggctcaagcgattctcctgcctcagcctcccgagtagctgggattgcagggcccaccaccacacctggctaatttttgtatttttagtagagatggggtttcatcatgttgaccaggctggtcttgaactcctgacctcaagtgatccacccgccttggtctcccaaaatgctggattacaggtgtgagccaccgtgcctggccaaaaactattttttgaaaacctgaacaagtaacaataaatggagaaaattacaaaagcaaattactcttttccaaaaggtgctaggcccagacaaattcttagttatttcccagccttcctcgtaagaaatgggaaatgaaaaagcttcccaattccttctgggaatgcagacaaactgacaaagcacaacggaagaaaactatgtatttcttcattggtgcagcggtgagtaagaaaaaaagaaaaagaaagaatatgacgttaacctcacttgccattcctagattgttttttattacttatttattttttgagacagagtttcactctgttgcccaggctggaatgcagtggtgccatcttggctcactgcaaactccacatcccgggttcaagccattctcctgcctcagcctcccaagtagctgggattacgtgcacgcaccaccacgcctggctaatgtttgtatttttagtaaagacagggtttcaccatgctggccaggctggtctcaaactcctgacctcaagtgatccacctgtcttggcctcccaaagtgctgggattacgggcgtgagccaccgtgccccgcctgtttttttttttttaatttttgcaaatatgacatgtaaagaatgacatctggttttgatcttgatttctttgatccatgtgtctacagttcttttatgaactgtaagtgccttttacccatttttttcagtacgtgtttgggtttttctgattcatttgcaagagtttctttctttctttttttttttttgagacagagtctcgctctgtcgcccaggctggagtgcagtggcgcgatctcggctcactgcaagctcttcctcccgggttcacgcctttctcctgcctcagcctcccgagtagctgggattacgggcacctgtcaccaggcccggctaattttttatatttttagtagagacggggtttcaccgtattagccaggatggtcttgatctcctgaccttgtgatccacctgcctcgccctcccaaagtgctggaattacaggcatgagccaccacgcccggccaagagtttcttttttttttcctacttttactttgctttttctttttgcaagagtttcttataggttaaggatattaaccctttgtctactgaaagcattttccccagaaaaagcaaatgactgctttttccattttgtttataccacttgaaatagaggacattttttaagtctctcttaagtcatactagtatctttttgcaatttcttctattacttttgtgctagaaagtccctccccggccgggcacggtggctaacgcctgtaatcccagcactttggaaggccaacatgggcggatcacctgaggtcgggagttcgagaccagcctggccaacacggtgaaaccccatcactactaaaaatacaaaaattagctgggcgtggtggcatgcacctgtaatcccagctactcgggaggctgaggcaagagaattgcttgaacccggaggcagaggctgcagtgcgccgagatcatggcattgcactccagcctgggggacaagagcaagacttcatctcaaaaaaaaaagagagtctgccgggcacggtgactcatgcctgtaatcccagcactttgggaggctgaggcagcagatcatgaggtcaagagatcgagactatcctggccaacatggtgaaaccctgtctctactaaaaatacaaaaattagccaggtgtggtggtacacgcccgcctgtagtcccagctactcaggaggctgaggcaggagaatcacttgaatcaggggggcggaggttgcagtgagccaagatcacaccactgcacttcagcctgggtggctgagagaagctccatctcaaaaaaaaaataacaaaaatgcatatccaatgaaatcactgttctagaaaagtaattagatgaatgtaattgtacatatttcagttgtaggacaagtagaatccactatgtaaagactgaatgaataaattacgatagcaaaacactgtatgataaaatactacagggccactctgcagtatactatcatgacacagggaaatagttatgatctattacaaagtggggtgaaaaaaggcagaacatctctctctttatgaacatgacttcttcagcaagataggcattctaggacacttactacaatattaactggatcttcccagggtttcagatgtaggtggtgtcctatttctttttgtttttctactttaaccattattaatgaacacgtattattattatttttttttaataaagacaagctctcaagctgggcaccgtggctcatgcctgtactcccagcactttgggaggctgaggtgggcagatcacgaggtcaggagttcgagaccagcctggccaacatggtgaaaccctcccatccccgactctactaaaaaactacaaaaattagctgggcatggtggcatgcacctgtagtcccagctactggggaggctgaggcaggagaatcacctgaaatggggaggcagaggctgcagtgagctgagactgcaccactgcactccagcctgggtgacagagcgagactctgtccccaaaaaaaaaaaaaagaaaagaaaagagacgagatctcattatgctgctcaggctggtctcgaactcctgagctcaagtgatcctcctgcctcagcttccctaagtgctaggattacaggtatgagctaccacacctggcctatttgtgattttttaaaagctcaaaattcataaatatatatgcaagacaagtcactaaaaacagttttgctcaatgcctaagttgtacttatcatgaaaaaacgaaagatactggtagtggctcacactgtataatctcacttgagccaagaagttcaagaccagcctgggcaacataacaagggtctctacaaaaacaaacaaaaaaattaaagacacctttcctaatttactcccgtattataaacgggataataaactcctgattcaagaaaaataggggctttgtccatcctcctaattacatgaagatctaaggagtaatgccccgatttacattcctggcaaaatgacaaagttaaaaaaacactcccatggcaactatcggtgctaataagtcaagctcagttaacacaaatggttctatttttcccttcataaactgtgcctttgcgtgtgaacaagcactgttgaccttcaactaagctgaaaatcctattttatgtctgttaaccccaaaactttctaaacctctccaaaatgtctaggagtgatcacgattagataataaccagattaaagtaactagaggtcagaattgtgaactcaaaacgaggacgacctagaaatggctaagcctgggcaggctgcttctccccagcaccctgctgaaagacagtgcttaatgaagggggtggaaagaatgaacaaaaggggcttagaaatcctgcaacctggccccccattggcaatggaagacacagaggggaaacagagtcttatccccagttggaggcagccccagaaccagaacccatactggtctcatttctcctagagacagttaaagggataatgccaggatatgcacacagggcacatgtagtacctattctgagctgtgctgagccagatgctgtgaagctacacacattaagctcccctccacaacctcaaggagccaacaagactagcaaacccctaaaacctagctaggacaagtgtttccagagagctggaatacaaacggatgccgatttttaaacaagaaccctatagggtaaaatcagaaagagttatttaaggctattatctaagtatgatgcaaaagtctccaatttaatactactagagcaaaactaagaaattaatgcaaaggaccaggcacggtggctcacgtctgtaaggctcacgtctgtaatcccagtactttgggaggctgaggcgggcagatcacaaggtcaggagttcgagaccagcctggccaacatggcaaaaccccatctctactaaaaatacaaaaattagccaagcgtggtggcgtgtgcctgtaatcccggctactcagaaggctgaggcaggagaatcgcttgaacccgggaggcggaggttacagtgaaccgagatcacaccactgcactccagcctgggcaacagggtgagacccccatctcaaaaaaaaagaaaaagaaaaaagaaattaacacaaaagagcaccatcaacccaacagacattatgtgtacccaaagggtctaaacaccaaaagcgcccaaacttaaggttcacatttactgggacaatggggccagcatggtggctcatacctataatcccaacactttgggaagcccaggcaggaggatgacttgaggccaagagttcaagaccagcctggacaacatagaaagaccctgtctctacaaaaaaaaatgtctaaatatatgaaaaaaatattaaaatatagagacaataatattggaaaatcttctattccaaattttacttttctttttaattcaaaggtggcagctgattgttccaagcattattttagcagacaagcaaataagaaatctataaaatactttaaacaaaatcatgttctgacagatttttattcatctttaagaaaaatgtttcctatgaaactttagagtttgaaaaatgagacttctaatttgaaaattaaaccaagaaaaacaatctgcaaataacacttagttctccaatacatcataaaattaccaggcaaatggggaaaatatgtataacatttattaaagtgttcacgtccttgatataaaaatactgttataaatcaccaggaaagagagacagatacaagactggaaaaactggcaaaaaaaaccacaataagccaaacaaaatataaatggccaaaagaatcattaaaaagtactcaaactcactaggtatcaaagaaaagcaaaataaacatagtgattccattcttcactcaaattggcataaaaaagaaaaaatgttttattatggcaatacttcccagtgtgttaacctgaatgcaggaggtctctggcatgtatgttaggtatgtgttaaagtcttagaaatgcaaatgatatgccttccaacaatttagtctaaagaaataatcaggaaaatgcactcagatttaggtacaatgctgttcaccactgtattatgtccaccacagcagaaaatggctcataagctaaatacctaatagaaggatttgtcaaataaaacatgatgtattcagcacaaatgagctacaaataaaggactatttagtcacatatctaagatacattgctaagtaaaaaacaggcttaaataccctctgtataatctctactttgaaaaaaatagttatatatattgtatatatgcacattttactttctttttcttttcttttttttttttgagacggggtctcattctgtggcccaggctagactgcagtggcacaatctcggctcactgcaacctccgcctcccagttcaagtgatcctcctgtgtcagcttccctaatagctgggattacaggtggctgccaccacacccggctaattttttgtttttagtagagatggggtttcaccatgttggccaggctggtctcaaactcccaacctcaggtgatccacccacctcggcctcccaaagggctgggtgattaccggtgtgagccaccgcgcccagccacagtttactttcaaatataaccagataaaagaatattcaatgagtaaaataagctactttatgtatacgcgttccaccacaatcctaatattccttaatctctctaagacaggacaccagtcccgatatttttccactaattctgaccttagttctaaccaatagcttcatatacatcaacagtatatttagatttagtggtctctatatgacagttcctaaaatagctgtgaatttcctacatattcttctcaatccatttcctactgcaaaaaggcagacacaaaaatttctgagaaatgacagatgatctccaaacaccctgctctatctttgctctctgcatagaccagggacaaccctacatacccaagggcaagtcaatagcataatcattcaatttctcaggagaactgcatcacaggtcatattacgttaaaagaaagtgcacgaacagacctaatacatttgtcatcaaagtgacacataaggacctgtaagttagcaatacgcacatttccatcccattcagtcaactatgaaaaggctttaaaagcagtataaatatctgaattttagtttatttatagcaatggtgctcagctctggctgtaccctggaatcacctggaagtgctcgggctgaatttctcatcaactgcatcctggtctcatggatgtggccagcatccgtagttttttaaagtttcccaggtgatcgcaatttgctgtcgaggttgaggaccactgacatgaagcatatttttcaaacaacagataatgaatgttccatgggagtgagtactcaaatcagtggttggggttggcaattccctccctccctccctccctttctttctttcttccttccttcctttctttatctttcagatggaatctcactctgttgcccaggctggaatgcagtggcaagatctcggctcaccacaacctccaccccccaggttcaagcgattctcctgcctcagcctcctgagtagctgggaccagaggtgcatgccaccatgcccagctaattttttgcatttttagtggagacagggcttcaccgtgatagccaggatggtctcgatttcctgacctcacgatctgcccacctcggcctcccaaagtgctgggattacaggcatgagccaccgtgcccagcctctttcttttttgagatggagtcttgctctgtcacccaggctggagtgcagtggcatgatcttggctcaatgcaacctccacctcctgggttcaagccattctcctgtctcagactccccagtagctgggattacaggcgtgtatcaccacgcccagctaatttttgtatttttagtagagacggggtttcaccatgttggccaggctggtctccaactcctgacctcgtgatctgcccacctcggcctcccaaagcactgggattacaggcgtgagccaccgtgcccggacgatggcaatttcttaatttgaaaaaatggaatgaagtagactagactaggctggaagaaattatcataatgtactgctccttatgcagataaacattgtctcaagaaatttttcagttaaaaatatgtaattcttggcaatactacccaaactgatcttcagattcaatgcactcactctcaaaatcccatctgcctttttggcaaaaattgacaagccgatcctgaaattcttatggaaatacacaggacccagaatagtcaaaacaatcttgaaaaacaacaaaattggaggactcccactaccccatttcaaaagtaatatgaagctatactaattaagacagtgtggtataagtacatacaaagatactaggataagggtagccatatagattaacagaatacaattgagaatccagaaataaacctaaatatgtgattttcaaaaaagggcatcaggacaacgtaatggggggtagagtcatcctttaaacaaatggtgatgagacaaccgaaagtccaaatgtgtggccaggcacggtggctcacacctgtaatcccagcactttgggaggccgaggcaggcagatcacctgaggtcgggaattcgagaccaatctgatcaacatggagaaaccctgtctctactaaaaatacaaaattagccgggcatggtagcacacgcctgtaatcccagctactcgggaggctgaggcaggagaatcgcttgaacccaggaggcagaggttgtagtgagtcaaaatcgcgccattgcactccagcctgggcaacgagagtgaaactccatctcaaaaaaaagaaaaagtccacatgtaaaacaatgaaggtggacccctacctcaaacattaaaatcgatcagagacccaactttaagagctaaaactataaaattcttagaagaaaactgagagggggtaaatctttatgaccttgggttaggcagtggtttctaagatatgacaccaaaatcacaagcaaaaaaagaaaaacagacacatagagactttaacaaaaattaaaactttcttaactgcaaaagacacaagcaggctgggcgcagtggctcacgcctgtaatcccagcacttcgggaggccaaggcgggcagatcacaaggtgaggagatcgagaccatcctggccaacacggtgaaaccccgtctctactaaaaatacaaaaatttagccgggcgttgtggcaggtgcctgtagtcccagctacttgggaggctgaggcaggagaatggtgtgaacccgggcagcggagtttgcagtgagccgagaccgcgccactgcactccagcctgggtgacaaagcaagactccgtctttaaaaaaaaaaaaaaaaaaaagacacaagcaaggccaggttcggctcacacctgtaatcccagcactttgggaggccaaggtgggcagatcacctgaggtcgggagttcgagaccagcctgaccaacatggagaaaccccatctctactaaaaatacaaaattagccaggcgtggtggtgcatgcctgtaatccctgctattcgggaggctgaggcaggagaattgcttgaacccgggaggcggaggttgcagtgagccaagatcgcgccattgcactccagcctgggcaacaagagtaaaactgtgtctaaaagaaaaaaaaaaagacacagcaagaaagtgaaaaagaatcttacagaaagaggaaaaaatatttgcaaattacataccagataaaggactcgtgcagaatatattaaggactcttacgactcaacaatataaagacaagtaacctaattaaatgggcaaagaaagctggatgacccagcacatgcctctagtccagctactcaggagcctgaggcaggagtatctcttggaatctgaggctgcagtgagctatgatcactcttattaagaagccactgcactccagactgggcaacatagcaagacccagtctcggccgggtgcagtggctcacgcctgtaatcccagcactttgggaggccgaggcgggtggatcacaaggtcaggagatcgagaccatcctggctaacacagtgaaaccccatctctactaaaaatacaaaaaattagccgggcatggtggtgggcgcctgtagtcccagctatttggaggctgacgcaggagaatggcatgaacctggcaggcggagcttgcagtgagccgagattgcaccactgcactccagcctgggcaacagagcaagactctgtctcaaaagaaaaaaaaaagacccggtctcaaatataaacaaaaaaatgagccaagaatttgaatagacatcactgcaaagacagcatacaaatggccaacaagcacatgaaaaggagttcaacatcatcagtcactagggaaatgcaaaccaaaaccactgcacacccattaggatggctataatcaaaaaaagcagcaataacagttgtcagcaaggacacagagaaattggaaccctcatataattctggagaacctactttgtaaaatggtttggcagctcctcaaaatgttaaacatagaatcggccaggcatggtggctcacgcctgtaatcccagcactttgggaggccaatgcgggcggatcatgaggtcaagagatcgagaccgtcctggccaacacggtgaaaccctgtccctactaaaaatacaaaaattagctgggcgtggtggcacgtgcctgtagttccggctacttgggaggctgaggcaggagaatcacttgatcccgggacgtggaggttacagtgagctgagatggcgccactgcactccagcctggtgacagagcaagactccgtctccaaaaaaaaaaaaaaaaaaagttaaacatggaattaccatatgatccagtaattccacttctatgtatctaccaacaaaagtaaaaagatgatcacacaaaaacttgtattcaaatgttcataacagcattatttataacaggcaaatgtgaaaataacccaaatgtccatcaactaattaatggataaacaaaatgtggtatatccatacaatggattattcagcaataaagtggaggtactgacacatgctgtaacatgcataaaccttgaaaacattatgctaagtgaaaaagcctatcacaaaaaaccacatttttttttttttttgagacagggtctcgctctattgcccaggctggagtgcagtagcatgatctcggctcactgcaacctccaccactcgggttcaagcaatacccccacctcagcctgcctagtagctgggactacaggtgcgcgccaccatgcccagctaatttttgtattcttagtagacgcagggtttcaccatgttggtcaggctggtcttgaactcctgagctcaggtgatccccccaccttggcttcccaaagtgctgggattacaggcatgagccactgtgcctggccaaaaccacatattgtatgataccatttatatgtccagaagagaacatctatagaaacagactgcggattagtgttgccagaggctgggtgaaaaggggagaagggagagtaaccactaatgacagccagatggtagtggttatgaaactcagtgaacatgctaccaactactgaagcatatcctttaaacaactgaattttatgtaaattatctcaatgaagcttccttatgtgttattctggatgtagggaatccctctcccgccatgcccacagaatctcgtctggtttcttttccataggatagtatgaataattaacctttctaaatcaaaggccttacttaaaggtctatatcaatttagggcatcataaccaaaatttttatcatgaaatccgcatagaaaatttcagagtacacggcctaaaaggttatctggctggatgcagtggctcatgcctataatcccagcagaggcgggggcaggaggatggtttgaacccaggagttccagactagcctgggcaacatagagagacccctttcgccacaaaaagaaaaaacaaaggttatgtggtgtggtatgaaacctttttatttttttgcccaagctggagtgcagtggcacgatctcggctcactacaacctccgcctcctggattcaagcaattctcctgcctcagcctcctgagtagctgggattacagctgcctgccaccatgtccgactaatttttgtatttttagtagagatagggtttcaccatgttggctaaactgttcttgaactcctggcctcaagtgctcaatccacctcagcctcccaaagtgctgggattacaggcatgagtcaccgcgcctggccttgaaacttttgtctgagatacatacatacacacatacacacacacacacacacacacacacacacacacacacacagagatgaatataaatagagagaagtgggtcagtcaaaacaaaaagtctggaaaatatattttagcagttgaccgtattcaagaaataaaacagtaagtgtgagatctcagagtcaaaaagagaaatcaaaaaaaaaaagctgaagtcactttaaagcatcattgtaagcaatggaactaaacaccagaaaaagtatatttgaccctggtatctactttggtaagtcaagtaataagcttccctcctccatccacctctcagggttcagaggagcttcctactcccactaaattcaggccccttctggtgaagtctactgtagatcacatgtggagctccgcagggaagggtgtaccatcactggaaatggggactgcagggctgcaggtgggcagcgtggacatgcaggccccaaactcacactaggggtccagaagcaagtgcaaaaagaactcaaacagaagccaagggtcaactggaggaaagaaaggagaaggaacaaaatcgatattgctaacttattcagtttatctttgagtggatgaaagaataaaggaagaggaacaaaaacccatcaaacttctctgagggagacaacattttcaaacactgcaggtcaggatctttgacacagaagatgcgagcagctgcacaatccaacagccggggctaaaacagaagccctggggacaaacctgaagaacgatcactcgtgaaactcctcgcagcaagaaatctgaggtcatcttcaaatcagcagggaaacaaaaatttagagaattatcactctcagggagagactaccaagaatatctgtgaggattgcagggtcaatgtcaagatgctgggctttgttcgctaaaaaaaacactatgtggccgggcgcggtggctcacgcctataatctcagcactttggaaggccgaggtgggcagatcacgaggtcaggagattgagaccatcctggctaacacggtgaaaccccgtctctactaaaaatacaaaaaattagccgggcgtggtagcgggcgcctgtagtcccagctactcgggaggctgaggcaggagaatggcgtgaactctggaggcggagcttgcagtgagccgatcacgccactgtgctccagcctgggcgacagagcaggactccatctcaaaaaaaaaaaactatgtatgagactgtaatctgtaattaggacacttcttgaataccactaaagaatatttacaatattgcaattgagtaaaaattgaaaataaaacctatgacagttaaacctattctgcaagtactccacgatgcattaaaaaaaaaaaaaaaaagttggccatgcgtgatggttcacgcctgtaatctcagcactttgggaggccaaggcagacggatcactcaaggtcagcagttcaaaacaagcctggccaacatggcgaaaccctgtctctactaaaaatacaaaaaaaattagccaggcctggtggtgggcacctgtaatcccagctactcaggaggctgaggcaggagaattgcttgaaccagggaggcggaggttgcagtgagccaagatcacaccattgtactccagcttgggcaacaagagcaaaactccacctcaaaaacaaaaagtagctgaccgtgtgtggtggctcacgcctgtaatccctgcactttgggaaaccgagggggggccaatcacctgaggtcaggagttcgagatcagcctggccaacatggtgaaaccctgtctctattaaaaatacaaaaattggctggacacagtggctcacacctgtaatcccagcactttggggggttgaggcaggtggatcatgaggtcaagagttagagaccagcctggccaacatagtgaaaccctgtctctattagaaatacaaaaatttgccaggcatggtggcacacacctgtagtcccggctactcgggaggctgaggcaggagaatcacttgaacccaggagatggaggttgtggtgagctgagatcgcgcccctgcactccagcctagcgatagagagagacttcgtctcaaaaaaaaaaaaagaaagaaagaaaaaaaaaattagccaggtgttcaggcacctgtaatcccagctactagggaggctgagacaggagaagcgcttgaacctggaggtggaagttgcagtgagccaagattgcgccattgcactccagctgagcagcaagagtgagactctgtcaaggaaagggaaagggaaagggaaaaggaaaagaaatcgctaactaggccgggcgcggtggctcacatttgtaatcccagcactttgggaggccgaggcgggtggatcacaaggtcaggagggagttcgagaccagcctgaccaatgtggtgaaaccccatctctactaaaaatacaaaaattagccgggcatggtggtgggtgcctgtagtcccagctactcaggaggctgaggcaggagaatcacttgaacctgggaggcagagcttgcaatgagccgagatcgctgctgcactccagcctgggtgacagagcgagaccccgtctcaaaaaaaaaaaaaagaaaaagaaatagctaactataggaaggaggaaaaaaaaagacaaaatgatcatttgcagctacaagttaagtattccttgtataaaatgcttgggaccagaagtgtttcaaattttgtatcttttctgattttggaatatttgcatatatatatagtgagatatcttgagaatgggaccgaagtctgaacacaaaattcatttatgtttcatatacgccttagacacatagcctgaaggtaattctactcaatattttaaataattttgtgtataatggccaggtgcaacggctcacacctgtaatcctggcactttggaaggccaaagcaggaagatcgcttgagcctaggagattaaggctgcagtgagccatgatcttgccactatacttcagcctgagtgacagagcaagatcccttaaaaaaaaaaaaatttgcatatgaaataaagttttgactgcaacccatgacatgaggtcaggtgcggaattttccactcgtggcatcctgtcagtgctcaaaagtttcccattttagatttggggattagaaatgctcaatgtgtattatgattacctatctaagaaactcaagagaatctactgaaaaataagaacaacagagtttggttaagtagcatagcagacacggtgctattacattttcctcacggacacaccaaaggactccacttcccagcccccttgcacctaaaatacagccaacagaccgcagaagaaatactactacttccaagcttggcccatgaaaaaaacttccatgcacaaaattacacggcaaacttaaggtcacatcttcttgtcagttgtgacaaaaatggaaggagcccagatccccaagtcaccacttagaaaagaaccatctaaaaaagtgtgagcaagaaataaatgttttctttgtcaggccacagattttaactagcattacctaccctgactaatacaggttataaaacatacagactggccaggtgcagtggctcatccctgtaatcccagcacttcaggagaccaaggcagaggattacttgaggctgggagctggaggccagcctgggcaacacagcaagattccatctctagcttattttttattttattttatggttttttttgagacagagtctcactcagtggcctgggctgaaatgcagtggcgcgatctcgactcactgcaacctccgtttcctgggttcaattgattcccatgctactcagcctcctgagtggcagggactacaggcatgcaccaccacaaccagctaattttttttttttttaatagagtgggggtttcaccatgttggccaggctggtcttgaactcctggcctcaggtgatccacccacctcggcctcccaaagtgctgggatttcaggcgtgagccactgccccggcctccatctcttatcttattataaaaacaaggccgggcacagtggctcacgcctgtaattcccagcactgttggaggccaaggcaggtggatcgctagaggtcaagagttcaagaccagcctgaccaacatggtgaaaccctgtctttactaaaaacacaaaagtggccaggcatggtggaacaggactgtaattctacatcggaggctgaggcaagagaatcacctgggagaaggaggttgcagtgagctgagatcgcaccactgacgccagcctgggcaacaagagcaaaactccatctcaaaaaaaaaaaaaaaaaaaacaacccacagcatacaaactgcaagcagtatacttgctttatacctgctctataccagttagtaatagcgggtgggagggaggtgtgaggggagataatcgcattctaaataccaaatattttctttgtttttgagcagggtgtctccctctattgcccaggctggagtgcggtggcaccatcacaactcactgcagccttgaactcctgggcttgagttctcttcccacaatcagcctccctagtcagtgggaccacaggtatgcacaccaccacgccaggccactttaaaaatttttgcagacatggggtctcactacgtttcccaaactggtcttaacctcctgacctcaagcaatcttcccatgtcggcttcccaaagtactgggattacaggcataaatcacatgtccagtccagcaaatactttaaaataaagaataagtaatcagccaggcatggtggctcatgcctctaatcccagcactttgggaggccgaggcaggtggatcacaaggtcagcagttcaagaccagcctgaccaatacggtgaaaccccatctctactaaaaatacaaaaattagctgggtgtagtggtgcacacctgtaatcccagctactcaggaggccgaggcaggagaattgcttgaatccaggaggcggaggttgcagtgagctgagatcacaccactgcactccagcctgggtgacagagagagactccgtttcacacacacacacacacacacacacacacacacacacacacacaaaagtaatctatagaccacatattaggaaaaatctagagacactgactttttctgttcatacacagaacaagtcaatattataaagatgacaagtctccccaaattaacttatgcatttaatgaaatttcccattaacagtattttgacagcctggccaacatggtgaaactctgtctctactaagaatacaaaaattagccaggcgtggtggcacatgcctgtaatcccagctactcgggaggctgaggcaggagaatcacttgaacctgggaggcagaggttgcagtgagccgagatcgcgccattacactcaagcctgggggacagagtgagactccatctcaagatggagggagtattttgaaaccctaaattgaaaaacactggagtaaaaactgagcataggcactaccagataataaagcctactataaagtgattttaatgtctaaaatagtaaggtcatggcaaaagaacagataaactgactaaaacaacagatccaaggattcagcatatgattaaggtgttattttttaagttaataaggatgaattaatagtacccaaaaaatataaactagaggggacaaataatccttacttcataccatactccaaaacaaatatcagactaattatagccaatttttttttaaagaactaagagaaaacatgagtgaatacctataaaatttagggataacaaagccatgggaaataaaaaaagattgacagtttttttttttttttttttttggagacggagtttttcgctcttgttgcccaggttagagtgtaatgaggcgatcttggctcactgcaacctccacctcccgggttcgagtgattctcctccctcagcctcccgagtagctgggattacaggcatgtactaccatgccgggctaattttgtatttttagtagagacggggtttctccatgttggtcaggctggtctggaactcctgacctcaggtgatctgcccacctcggcctcccaaagtgctgagattacaggcatgagccaccgcgcttggccaacagacttgaatttaagtcaaggcatagaaaaaaatatttgcaaagtaggacaaaaaaatgcaaatcttaacacaggttgagtattcctaattcaaaaatccaaaatttgaaaggatccaaaatttgaaaggctccaaaattcagtactttctgagtgccaacaagacactcaaaagaaaatgctcagcctggcgcagtggctcatgcctgtaatcccagcactttgggaggccgaggcaggtggatcacgaggtcaggagatcgagcccatcctggccaacacagtgaaaccccgtctctactaaaaacacacacacaaaaaattagccaggcatggtagcgggcgcctgcagtcccagctcctagggaggctgaggcaagagaatggcatgaacctgggaggtggagcttgcagtgagctgagatcgtgccactgcactccagcctgggcgcgccactgcaccccagcctgggcgacaaagcaagactccgtctcaaaaaaaaaaaaaaaggaaacgctcactgaagcattctgaatttcagattaaaaaattaggaatgctcaactggtaagtatagtgcaaatatgccaaaatccgaaaaaaaaaaaagaaaaaaagaaacccaaaatccaaaacactttctagtcataagcacttcggagaaggtatattcaacctgtacgtgtttctcaagcaggtcaagatcaaaaacaatgtatctagtagcatcaactttactcaaagaacatggaagaaaaatgttttatattaaaacaagcactgatgtttctgaaacagaatgagaaattcacattaattttagataaaacagaagagacttaaaagaagtgtcatgcttgttatattccaaacacttttaaatatgcatacattcccccatatcatgcatctgtggaaaaatttgtgaagcaatgtctataaatataaatatcaaaaaagctcttgataagaaatatatgaacttgggctgggaacagtggctcacggctgtaatcccagaactttaggaggcttgagctcaagagttcgagaccatcctgaccaacacaggagacccccatctctaaaaacatagtgaaaccctgtctctacaaaaaatacaacaattagttgggtgtagtggtacatgcctgtagtcccagctactcaagaggctgaagtgggaggatctcttgagcccgggaggcagaagctgcaagtgagcagagatctcaccactgcactccagcctgggtgacagaccctgtctcaaaaaatatagatacatgaattcaatagaaaattctcagcactgaccacatataccttactgtgaagcaggatcaccaaactttttctgtaaagggccagagttacatggtctcttgagtgagcttggctgtgttgcaattaaaccttatttacaaaaccagatgctggtgatgcctccaccagcaacatccctgtcacctgagaacttgtgagaaatgcacattttcggggtccaccctagatcttcagaatgagatccatgtttgacaaggaaggtgttgtagttagcccccagctaggtgatctgcctttggagacaggaaatgattttagccagccctggagaggagtcaataaagccaaaccgaatttgaggctgaaatcccatctaaagtagaatgtataagaaattgtgttggccaggtgcggcggctcacacctgtaatctcagcactttgggaggctgaggcaggtggatcacgaggtcaggagttcgagaccagcctgaacaatacggtgaaaccccgtctctactaaaaatatgaaaattagccaggcgtagctactcaggaggccgaggcagaagaatcgcttgaacccatgaggcggaggtttcagtgagccgatatcgcaccactgcactccagcctgggcgacagagcaagattccgtccccaaaaaaaatatgaaaatacaaaaattagccaggcgcagttgcagtgaccgtaatcccaactactcaggaggctgaggcaggagaatcgcttgaacctaggaggtggaggttgcagtgagccaagatcgcaccattgcactctagcctgggcaacaagagcaaaactctgtctcaaaaaaaaaaagaaaaaagaaagaaagaaagcaattgtgtttccttcatgaagactgaggacacagcagtgctttcggtctgaagcagggtggagaagaccctcagagtcacaaagccaagaactctgagatgaaatgatggtccaaaatgaaaaagcttattcaaatttaattgaatggagctgggggtatgtatatattcacttgaacaaaggaaagccagtggggggaaaaaatgtgtgagcgttgaggtggtgggtagaagattcctacaggaacaaacaagggaattgacagaaagaatccaagctagggtgcataaaggcaaacactgtagccaggaatgaaccacaggcaaacaaggcaggagcaagaggagacggtcctgctcccattcagcctcagcctcctcccagtgcaccctttactccaccccaaaattttctaaaatgcacatctgaacaagtcactccccttctgggaatctccccgtgcctttccagacaaagattcaagccccataatacagtatcaaaggacctctccacctgacccccatcacatcctcagcatccttccaactgtcctaactcagttaccctctcccagtcacatgcctctcctgctccaccctttgctcacactgatccctcgatctggaatgtcattcccaacttctgtagcctaaccctactttctatcccaagtccccaaaagtcatcctggaacacagcatgattagagtctaacttcgagcttggcaactgaccggcctagggtcaaatcctgactctacttgtcagcgctaagaccctaggcaagaagctgccctcctgccacacctcagcatcctcagctgtaggatgaaaagcgttaatacccagcccacagggctgcagagactgatcaacgtgaaagaacacaggagtgctgggcagagctccctggcactcaactgacactggcttctctgccctcttctatactaacgagaacttagaaaccctgagtttcagatgagagctgggaatagtgttctacagtggtttaatggaacagaattcaagactcaggaattaacttacagaagttacccaagacttcatcaataaatgaaggaccagaagccaccttgcctgccagttgctaggactagcaataataacctaaagtgcccaatgcataatcaatacctatgggcaccatcactgtttccttggccctatcacatggggctctcttgtctttctagggtcccttctattgcttggagagggtccaacagagaagcgcaccttatcaaactgcacttccattcaacttagaagatagagggattcatctctgtaagagttacacacatagatggatgacctccaccaggtgctcaatgagatgatgcctttgggaaggaagcccgagccatcagctgctttgagcaaaactcatgagtgggcaaaactcatgagtgggccaggcacggtggctcatgcctgtaatcccagcactttgggaggccaaggtgggcggatcacgaggtcaggagtttgagaccaggctggccaacatggtgaaacaccatctctactaaaaatacaaaaattagccgggtacagtggtatgcacccataatcccagctacttgggaggctgaggcaggagaatcccttgaacccgggaggcagaagttgcaatgagccgaggtcacaccactgcactccagcctaggtgacagagcaagattccatctcaaaaaaaaaaaaaaaaaaaaaaaacaacaactcatgagtgaagattttcctgatcactgaccagagaaaaccactctcctttaaggatggaatttccatagagggccttagagacacctagatctgaggtcacagacttggctgaggtcacctgaggtcaaagtcgaaaattgggacaaaggacaatgagaagctcccaagatttatatttccattgaggatgaccttccccaaaaatctccacccttgcttttctgctgcatttgggtatgctgggttggcatcacaacttaacatggcctaaaccagctcctccagcatctcagttaatggcctctttctttctaggtgctaagaccagaacctcggagtcctcctcagttttctttctggttcatcagcaaatctcaacctcaccttgaaatcccactagtctcccctcagccctgcattctggctggtctccttgctgtcctgccttcaatctgtctcacacagcaacgcctagagtgtgcttgctaaaagctagatcagtccacctcccttctttactccaaaaccctccaatggcttctaccaccctcaaggtaaaatctaccagccttacagtggtccgcatggccttacatgatctgacccccatggtttctctgacctcaagaccaaattctcccctcctcctgcctcagggcctttgtatctgctgtttcctcccctcagaatgatccttctcccagatctccacatgcctcactccctacacatctttagttaaaaatgactcaagccctctgctatgaactcaactgtatcccccaccaccaccgaaagaattcattatattgaagccctacccccacaatgtggctgtatttagagatagagcctttaggaggtaaccaagtttaaatgagttcttaaggatggggccctgatccaataggaaaactttatttttttaaacaaagtagctttgtcacccaggctggtgtgcagtggcacaatcatggctcactgcagcctcaacctcttgggctcaagcaatcctcccacctcagcctcctgagtagctgggactacaggcactactaccacgtccagcgaattttttattttattttattttattttgtagagacagagtcttattatgttgcctagactggtctcaagtgatcctcctgcctcagcctcctgaagtgctgggattacaggtgtgaccaacagtgcttgaacagaaagataaatggcaccaagaaaaggccatgtgaggactcatcaagaggatggccacctacaagccaggaagaaagccctcaccagaaactaaagaggccagaaccttgaccttggacttcccagactccagaattatacgaaacaaatttccgttgtttaagccacccacactgtgctatttttgttatggcagtgttagcagactcatataccttcctccctgtctacccttccaaaaatatcaactcccatccccacacttaatcccccgagccttgtcagattcctcttcacagaaccagatctcattgtccacatccctacagtgtgggctccatgtgggctgggaatctccctgcagcatcccaagcaccaagaatattacccagcacagatcaggcactcaatgtaataaatgtatgaaaggcctatgaaaggtgcaagctgaaagcagacctcaattacaggagagccaagaacctagaacctgtgacgaaataacaggttcaaaatagcaaagccacagagaaaatgagaagaacggcatagcgcacaaagggctcgtttcaacctagaggctgcaatgcacagcttaacctggaggaggatggttccctacagaaagaataaaagcaagcccagagaacaactggaggaatagcagggcatgaaaatgaattaatgaggtgaggttactgggcactgggaaccaacagactggtgtgtgagagttttatgggcaaggccaggaaacggttcaggaaggactgtaagatgtttaaatttaaaaagcctaagaggattaaatataaatacgtttttaaaaagcttcaatttacatgtacaaagcaccatataatttcaaatcattactgttgatctttttttttttttttttaggagacagtctcactctgtcacccaggctggagtgcagtggcacgatctcgactcactgcaaactccacctcccaggttcaagcgattctcctgcctcagcctcctgagtagccggaaatacaggcatgcgccaccatgcccggctaacttttgtatttttagtagagacgaggtttcaccatggtggccaggctgctctcgaactcctgagctcaagcgacctgcccgcctcagcctcccaaagtgctgcgattacaggcatgagccaccatgcccagccccggcctactgcttttaattaccttaaccaaaatgggaaaattcctcaagctaccagtggtaccagaatataggtccccaaatagatccctggtttgtctttagagacactgaagaggacaacaatagccaattcgggatttcaaacaccccacaaactagaccttaggctctgtgagggcaaaagacacagtttattcaacaacgatctgttcaacagaacctggtcaccaagtggatggatggatgggcagacacagatggacagactactcagtgggtggctacatgtgcttgcctgccccgggacacatgactcacttctgcaatgctacatagactagagtttgctccatcaatgagatagatagtatggcatgaaacctagcaaaaccatctacatttttctagccaggtactggttttttttaagctggccgccatactcagctattttttttttttttttatagaaacaggagtcttgctgggttgcctaggctggtcttgaactcttggcctcaaacaatcctcccacctcagcctcccaaagtgctgggattacaggtgtgaaccacaacacccggcccaggtacttcaataggcattttttaaacatgtcaacagatgtttaaacttaattgacttaattgaccgtgccacagtcagagaatacaactgccagacaaccatctaaaatactgtcaacataaaaagttcctgaaatacctattgtcttaaaaaatcaccctccactctaagcaaagaaaccaaaagagaaatgccttggtattaaaagaaagaagctggttgccattttggcaaaggaaatagcctagaaagcagatacctcatgctcaggatgtcacatggaacaggctggacacacctgctgcctccctttaactagcaggtgtgccatgagagcttacactgggcacacccactggtgcccaaaagccattaaattggggatgaatgaaaagagaacagtagtaatacgttcataagtgaccctgatagagccaaccataacccagcacagaattctgattttttgagctgaaaagggccctttatacatctcaccaggttcaaacaccttcaggggaggcaggcaacgtcacctgcaacggtgaaaaaggcaggtgtagacaaccagaaacggtgaggcccaaacccaacagcattcaaatacaaaagcataaaataaaaatgctccagccaccccaattccagccttttgcttcagagaggacgaagccggctgagggaggtcacatggccaattagtgacagctcaaaccagactgcctccggactcccagtcccatgtcctcgcacatcccggggccttctctgcgcgcagatgacccaattgtcagcagggactgcatcttcccccgcccgtctcccagcactgcaagaatagaagtagcacctactacaaacgctgcagacccagaaagcccttatgggtgactttcttccacctgcagttgccctcatttaccctttgccctgacaatcgataatttcccatcagtcacgcttaaacccccagcctgcaggccgacatcctatcagccacccatccaagggggggcatctaggaccaaacgaaggagaaaatcctgcgccttaaagtagtcacactcgaaatgtcattttttccccccgaaaggtggcaaggagggggactcgcgaccccccagggaacaggccagaaaggccccggggtcggaggagctgcttctaaaattacttcgcgcagtctttgtagaagggaagaaagcaagaatgtaaaaggcaccctcttgccgcccctcctgatgcccctgaattccagggggcgagacgatgcccgtgcgcaccaccgggggaggggcgagggaagcgaccccaggacgcgcgggcgcagagcccgggaggaggcggcggcagccagtggggttctgggggcgccccatttgcctccccgctgcgcggcctgagggcccgagcgcgctgtggctcccgtggcgggaaggggtgggtaccccgggggcccggcccggccggcagaacggcaggagctgagggccgccgggcatcttgggccccggggccagggtggccggcgggcgcggggtcccgggagatgggtcggggtgggggcgcgcaggccgcgccgcggggccggtgggtgacagcgcgcgggggccgtgccaggccggcctcgtgggcgcggcgagcacctcgcggccccgccggcaggtgcggcccgcaggccgggcagggggcgcggcggccgggctctcacctggctgcagctcgcgtggttcccgtcctgccgccgcgcctcggcgccgcagtgcccgctgcagcctccgcctccggtccccgcgacagccgcctgcaaaatggcgccgcggaggggcgggccgggggcggggtgcagcggagccgcccgcccccgcgccggtctggggcccacctccctccccgcccccgacccctgccctcgggcctccccccggggaggggctgctccctggcacccggcagcgctccccggaacatcccgggcctcgcacccagccgtccccttcccgttcctttcatttccctcccctgcgcagaaagatcgccccccttcgcgacccttcccaccagtcacacctgttcctggggacccacctggcaagcagagcgctggtccctgagtgtcctggtccaggtcccccctttttaccccgcctgccaccgagccctgtcattgctcgagcgtgataagcaagcagtttgtggtgcattgggctcagtgggttggatgttttaaaacaatttcaccgcttctccacttaggtagccagtttttttaacctaactggagaagaagtccttcttacctcatgcagagatcgtaatacagaccaaggcttttcagacgtgaattctctgggggtcgtgttaggctaggggcgggttcacattcagtggctctggggtgcagcccaaaagtctgcacttctaaattgtccccaggtgatgcccccgggtgaggttcttggaccgctaagcagaaaggccaagtgtaaatccctggccctcggtcttagagctgggcagcctcactttgaggacttcattaagatgcagatggctgggccccacccccagagttgctaaggctggaggtctggcgtgaggctccagaatctgcatttctgccaagttcccaggtgatgctgatgctactggtctggggaccacacgtattgagccactgctgaaatctgaatacaattttttaaatgttctaataattagtactttcttaacaccttccatcttgaaaccgttgtcatggttgctttactaactgaatgataatgtactagttcccgggcaactcttgagaaacagaattgtagacggtgtctgtctgacctcacatggagagaaattgattttataatcagaattatttatgtgttttacacagttttggaaagtgacatcacacatattaatgcagttgggggagcagcaactaaaggaattttatgaaataggcaagtgtggtctgtgtcttgacaataatgtgtcttcccatttatttatctaataactgcatttttatttgcttatatttaattttttagagacaaggtctcactctgtcacccaggctggagtgcaacggcacaattaaggctgcagcatcaaccttccaggctcaagggatcccccaaccttggcctcctaagtagctgggatgacaggaccacaccaccaggtccagctaagcttggttttatgcgtcacgggcgcccatccttaaccttgacaaaatgaaccttctaatttgactgagacctgtctcagatatttgaagttcacaatccctactgggattcagtaagtagggaaaagaaagtgttggattgcaaaattcaataatgtcgaatgttttgatccccgttgaagatggagaaaataaaaaacaaagatgcggccgggcgcggtggctcaagcctgtaatccgagcactttgggaggccgaggcaggcggatcacgaggtcaggagatcgagaccatcctggcaaacacggtgaaaccccgtctctactaaaaatacaaaaaaattagccgggcgtggtggcgggcgcctgtagtcccagctactcgggaggctgaggcaggagaatggcgtgaacccgggaggcggagcttgcagtgagccgagatcgcgccaccgcactccagcctgggcgacagagcaagactccgtctcaaaaacaaaacaaaacaaaacaaaaacaacaacaacaaaaatgctgtgaccagcacccagagaaaaactcacgcattgccccgtaaccatcattctacaccagtgagagcatagagcgtattccagccaaccttttttttttttttaatacgatgtgtttgcttagcaaggaatgtggagtcttctgattagaagggaagggaagttccagggtcaagaccccctgagcttttaagtctatcccctccccatcgttattccatgaactgtggaatcttcagtgtctccctctccctctctaggcatttaccatttttctctatcctgaaaaaccttccatagtcccagtctgcccagccgtcctgcctgccttcctctgcccaacctcccctgccatcacccctcaggcactgtccctccctgttttatcagatgtcatctgtgaccttctaattgccaaaaccaattacaggtttacagtccttttcttctttgatggctctgtaacagtccactgacttctcactcgaaattctattcttgtgataataccactgtttcttgctaactatccatacaccccccttccctctcagtgatgtgagtttctcagactccagtctagaaatgttagtttcccctcatatctcctttctcccctgccctctccttctctaaccccctctgaaggtcagccatctcctcgtggttcccaaacctctctccctagacaagacagacatctttctgaacttgtagacacatttccaattgtcccttgaacaacctgccctgaatattctccaggaattgcaaataatctccactattgatgcattattttctcccataaactggtttcttatctgagttctctcattttgctaccagaaacttcaaactggtctttgagtccttgccccatagcctacatgtccactctgtcacctgtggtcaagctgggaagtatttctgaaattctcttctcatccaacacagatactgaccctcactggctctttcttggactgttaaccatcgaaaaagtttctctctggcctgttggactcaagactaatctcctgaaactatccttgttatcatcccagagcacagaactgataatctcacaccttttctgaaaatccttcagggcctcccagtcaaaaggataattggagaccaggcacagtagttcacacctgtaatcccagcattttgggagaccaaggcaggaggatcgcctttgccaggagtttgagaccacactaggcaacatggggagaccccatctctgaataaataaataaataaattaattaattaaaagtttaggccgggtgcggtggctcacgcctgtaatcccagcactttgggaggccgaggcaggtggatcacctgaggtcgggagttcgagaccagcctgaccaacatggagaaaccctgtctctactaaaaatacaaaattagccgagcatggtggcgcatgcctgtaatcccagctactcaggaggctgaggcaggagaagcgcttgaacccaggaggtggaggttgcggtgagccgagattgtgccattgcactccagcctgggcaacaagaatgaactccgtctcaaaaataaataaataaataaataaataaataaataaataaaaatttaatagctaaataaagaaagaataaacctttcccagtgtagcattcaaggcccttaatctctagtctcggcttctttttcttcttttttttttggagattttactgctgacaaactggctttggtatcagcagatagctctgacttctgtctttcaacgtcttacaaggattaaatgtatataaagtgcttattcagtgcatgaatatgtaggtgttcgatatcattatttttacataattatttttaccattatcatcaattaaaaaaatacatcaaatttttcctcttcagttgcttttccttttattttccattcatcttcctttctattacagctcatacaaacaaggtttttttttcctcctcccttaacttctctaaactaaatcagcagaatatatcaagaacgtttcatgacctggttaatttgattgaaatttcagtcatttccaggctgtgttatttttgagaggtaattgtagcttggggctattccatcttcatacagtacttttcaatgttattttcaacatctctctggagtctagacctggggcaaacgttttctggaaagagctagataataaatgttttaggttttgtgggccaagaggtaaaattgatgacattatataggtacagtacttatataatgataggggccaggcgccgtggctcacgcttgtaatcccagcactttgggaggccgagatgggtggatcacttgaggtcaggagttcgagaccagcctgaccaacatggtgaaccccgtctctactaaaaatacaaaattagccgggcatggtggcgcatgcctgtagtcccagctacttgggaggctgaggcaggagaatcacttgaacctgggaggtggaggttgcagtgagctgagatcgcaccattgtactccagcctgggcaacaagagcgaaactccgtctcaaaaaaaaaaggtgacagtacttatataatgatagaaaacaaatttccacagatttcttattgatgaaattcaaaatataataatgattgagcataatatatttttttgtttgttttgttttgttttttgagatggagtctcactctgtcgcccaggctggagtgcagtggtgggatgttggctcactgcaatctcctccctctgagttcaagcggttctcctgcctcagcctcccgagtagctgggattacaggcgcctgccaccgcacccagctaattttttgtatttttagtagagacagggtttcaccatcttggccaggctggtattgaactcctgacctcttgatccatctgcctccgcctcccaaagtgctaggaattacaggcgtgagccaccgtgcccagtcatattgagcataatatttttataatacaggtctactaatgaaaataatagaatttggggggtggggaaaataagattttgcttacttggggttcaaagttagtctttcctatcatcaaattgatggcaaatgttcatctgtaaaagccattttatttatttatttatttatttatttatttattttgagacggagtcttgctctgttggccaggctggagtgcagtggtacaatcttggctcaagcaattctcctgcctcagcctcccaaatagctgggattagaggtgtttgccaccaccccccactaatttttgtaattttagtagagacagggtttcaccatgttggccaggctggtctcaaactcctggcctcaagtgaaccacctgccttggcctcccaaagtgctgggattataggagtgagccaccactcctggcctgcaccatctcttgatgtcagcagaattcacactttctacatctgtctcatactaagacataacagatctagggctgcgtggcaggaccaagacctgcctgaaatgacgtgtgtgtgtgtgtgtgtgtgtgtgtgtgcgtgcgtgcgtgttcaatgatgtgcattgaagcattgtttcaagtagcaaaacaaaaacaaaaaacctgaaaacaacctaaacatccatcgatcagggaatggctgaatgatctatgagataggcaccgtatagcatgtataccacgtaggcttctccccactccaccgccaggcttgcttttattttttttgaaatataattcatgtacccataatactcccattttaaggtatacattttagaatatatcatttaaagtaaacaattgtggccatgcctggtggctcacacctataatcctagcactctgggaggccgacacaggtggaccacttgaggtcaggagttggagaccagcttggtgaacacagtgaaaccctgtctctactaaaactacaaaaattagccaggcatggtgacatacacgtgtagtcccggctacttgggaggctgaggcaggaaaatcacttgaacctgggaggcagaggttgcagtgagctgaaatcgcaccactgcgcaccaacctgggcaatagagcaagactcagtgtcaaaaacaaacaaacaaaaaaagtaaacaattgtaaagtatacaatttggtggttttcagtatgttcacaaagctgtacaagtaccactaattttagaacatttttatcactcctaaaagaaactccatatctattagcagtcatttcctatttctcctcttcccccagccccggcaaccactaatcttcactctctttctatggatttgactattctgaacatttagtataaatggaattatatgaattatatactaatatgtggtcttttgtgactggcttctttcacttcccatgttttcaaggttcaactacattgtagtgtgcttcaatatttcattccttttttcattgtgataaaatatatgtataataaaattaactttttttttttttgagacagagttttgctcttgttgcccaggctagagtgcaatggcatgatcttggctaactacaacctctgcctcctgggttcaggcgattctcctgcctcagcctcctgagtagctgggattacaggcatgcgccaccacacccggctaatttttgtatttttagtagagatggggtttcaccatgtgggtcaggctgctctcgaactcctgacctcaggtgatccacctgccttggcctcccaaagtgctgggattacaggtgtgagccaccacgcccagccaaaatttacctttttaaccacttttaagtgtaccactcagtggcattaagtgccactccagcctgggcaacagagtgagaccttgtctcccccacaaccccctaccccttgaaaaaagagagcgtttaaatgcacacaccctgaactcagaatgttagttctggaatctgtctgacacaaaagcacactggtgggcacggatctatgcccaaggggctcaaagaagcagggtttgcttctgcctcctccaccccagttcactctgcagctccggcagatctgaagcccagctaatggaagtaacctcttaccctcgaatgaccccaaattccttacctaaccattctcccctactcccagcaaataaccttgcttcctgatttttggcaactggtcatgagaagggcatttcctcatcccccacctccccttatccacgaccccactttcccatgagggacctctcttccctgcctcgagtactgaagacccctcctttgggtgtcctccatatttcaatgctgacctccctttctttattttttcttaagatgggtatgttgcccaggctggtctcgaactcctgggctcaagtgaccctcccgcctcagcctcccaaagtgctgggattgcagacatgagtcaccacgctcggccctaccacccttgtctttggaaagtttacatcctcccagttcccacaatcatctccccttctcagctcagcttctcaaaaaagccacgtacagtatttatttcctcctcctcacttccttcctccctttaccccaggcaatctgggctgcattcttgtattcctctgaaactgcccaggtaaattagccatgccctcaaaattgcacaatccagggaatcttttgcatatgcatcttaattttctggaggcatttggcacagctgtattctctcaggataatctctcttcttttgactttgtgactgcatttcctagtggttcttctacttctctgactgtatttttttctttcttctcagattcttcttcctcctgctcccttcaaaaaaggtgttggggataaggagagtgtggctatgtccatttctgttgtccctgcaaaagctcctcaaggccatcacatttctactgcctggatctccttaatgtcctctggatcattcttgctcagaaagtcccaccttggcctctcctggaaccaccccgagtccctaggctggtgcaagtatactccctccatgcatcacagcatttagaaagaaatgtatggaaataagttgtttttctgtttctctccctcactaattgtcagtgcatccagggcagaggtcttggtttatttaattctgtatgccagctcctcacgtggtgcctaccacacagtaagttctcagttcggttactactgaagtactcagttagtactcaatgactttacttgttccaccaaaccaacaggggctgcccgctgatgagaggtgaaatgcgaagggaaagaactcaggattaacccccagggttctggagaattggaaactgaattagtcaaggttctccagagaaacagaaccaacaggatatatagagggatatataaaaggatatgggccaggcgcggtggctcacgcctgtaatcccagcactttgggaggccgaggcgggcggatcatgaggtcaggagatcgagaccatcctggctaacgtggtgaaaccccgtctctactaaaattacaaaaaattagccgggcgtggttgcaggcgcctgtagtcccagctacttgggaggctgaggcaggagaatggactgaacccgggaggcggagcttgcagtgagccaagatcacgccactgcactccagcctgggcgacagagtgagactccgtctcaaaaaaaaaaaaaaaaaaagaggatatgaaagaggggatttattgcaggaattagctcacgtgattctaaaggccaagaagtcccaccgtatgccgtctgcaagctggggaacctggaaagctggtggtgtccttcaccctgagtctgaagatctgagttcctggagctgtgatgtccaagggcaggagaagatgaatggccctgctccagaagagggtgcaaatgtgccttcgccctgcctttttgttctgtctggacccacagtggattggatgatgcctgctcacgtgggtgaaagtggaacttttctgtctactgatttaaatgcttatctcttctgcaaacaccgtcccagtcagacccagaaataatgttttaccagctatctgggcatctcttagcccagacaggttgatacatataattaaccatcagataagccaagtggaaaacataggttacaggcaaaacacagaaggctccagtgccagggtatagaaatgagacttttgggttgggcactgtggcgcagacatgtaatccagcactttggaaggctgaggtgggtggatggcttgagcccaggagtctaagcccagcctgggcaacatggtgaaactccgtgtctatataaaatacaaaattagccggccgcgatggcttacgcctataatcccagcacttagggaggccaaggcatgcagatcacctgaggtcaggagttcaaggccacctggccaagatggtgaaaccccatctctactaaaaatacaaaattagccatgcgtggcggcatgtgcctcccaactactcgggaggttgaagcaggagaatcacttgaacccaggaggcggaggtctcagtgagctgagattgcaccattgcactacagcctgggcaacaagagcaaaactccatctcaaaaagaaaaaaaaaaaattagctagtcatcgtggtgcacgcctgtagttccacctactggggaggctgaggtgggaggatcatttgaactcgggaggtggaggttgcagttagccgagatcgcgtcagcctagcaggctgggagacagaacaagaccttgtcaagacagaaagaaagaaagaaagaaagaaagaaagaaagaaagaaagaaagaaagaaagaaaggaaggaaggaaggaaggaaggaaggaaggaaggaaggaaggaaggaaggaaggaaggaaggaaggaggaaagggagggaagcttttttcaataagggaatttaacctagaccctcatggacacacttagtctttgagggggaaataaggaaaaaggacaaaaatctatcagtagttatataaagtagaaaagaggttgaatgggagggacaggtaaaatgaaaagaaaaagaaaagagtttcaaacaggaagtggatgacagcaaatttgttttgttttgttttgtttttaaagaaaagaggcaaacaaaactgttggaatttgggatactgtcaccctctgggggcatagtgactaagcaaaggcacaggggtcttctgaagagctggccatgtgtgatgtcttgctatgggtgctaggcacacaggcatattcactttgtgagatttcattaacctgcacacttaagtgtgtttctctgtatgtatactacaaaaagttgttttttgtttttttttttgagatggagtttccctcttgttgcccaggctggagtgcaaaggcacagtcttggctcactgcaacctccacctcccaggttctagcgtttctcctgcctcagcctcccgagtagctgggattacaggcacccaccaccacgcctggctaatttttgtgtttttagtagagacggggtttctccatgttggccaggctggtctcaaacgcctgacctcaggtgatccccacctccccccgccccgtctcagcctcccaaagtgctgggattataggtgtgagctaccgcggctgggcttgttccctgtttcaaacagcttggtctctgtctgaggtggggcctggggcacaagaaaaggctcagggtcttgaatgggtcccaggtgctgtctccaggaatgtgtgccttagaaaagagggatgtgtctgtactgcaggatgtgaaggtttaagtttgaatatttctttgatcctagaataaatgagttatacacctcatgcagccttggcgagaaaaggcacagggtccctggcctgcctctgccttgctcagtgaccttggggaaatcatataaccaaactacatttaggtttcctagtatgtaaacttaagacaatttcgtctgccctatccactgcctaggttggtatgaggattaaatgaggtaattgatgtgaacgtgcttcctgcagatgtttttttatagccctttacaaataccatataagaagcctaatctagctgtagaattgagcccacaattggtttttgagccataatatcaaacactcagtctttccctaggtgatatttttccattctctgtttttgataaggtctctagtttgtaaggtcacttggaattcgagtcctttgtgcccagagtgttggctgcaccactaactcacctcctataagttagtacagacactcttcattggtcatgtgctacctggcaggcactgagctagacaccactgacaaaatgatggataagaaacttactgggcaggacacagtggctcatgcctgtaatcccagcactttggaaggctgaggcgggtggttcacctgaggtcgggagtttgagaccagcctgatcaacatggagaaaccccgtctctactaaaaatacaaaattagccaggcgtggtggtgcatgcctgtaatcccagctactcgagaggctgaggcaggagaatcgcttgaactccagagatggaggttgcagtgagccaagatcacaccattgtactacagcctgggcaacaagagcgaaaatctgtcacaaaaaaaaaacaaacaaatgaacaaaaagaaacttactggccaggcgcagtggctcactcctgtaataccagcactttgggaggctgacgcaggcggatcacttgaggtcatgagttcaagaccagtctggccaaaatggtaaaacctcgtctctactaaaaatacaaaaattagccaggcatggtggcgtgcgcctgtagtcccagctacttgagaggctgaggcaggagaattgcttgaacccgggaggtggaggttgcagtgagccaagatcatgccactgcactccagcctgggcaacagagcaagaatccatctaaaaaaaaaaaaaaaagccaaacttactaggtctgcccccagtgaacctgcatgctggtaggtatgggaagacagaagaagggtcgggcacagtgtcttaaaaaagttatttgagacaatgccatcagcaatgccatcagcattggacgatgggagaatagatcatctcacttgcccattcttcaaatggccccaccgaaagcataggttttaaactggccattaaacctgctcgtgactttatcaacctcagccacatttatccggatggaggtgtagtctttgatgctgatgatgcagttgctggtggagcatttcatatacgtccacaaactcactagcattattctgcatgttgaggccacacctgttgccaccacacctcatatgagcagataaagcacttaattattttttgtttatttcttggctgccatctcatgtcgtagaacacaagtccaccgagtaccaggagccccgccaggtgttggttatgcagtgagttatcttctgtcttcccatacctaccagcatccgggctcttatatgcttcctctcggcctcccaaaatgttgggattacaggcatgagccactgtgcctggcctcaaataactgttgactggagagcatattgaatgtggaatacttgtcataaataaatagtgaaaacctaaaaacaataattattattactacgttagtgataaatttaaaaagaacaagaggaacaggctttgatcgaacttggcaggcaacttaggtaagaagataaaggatgaagaaggtgacattattgctgagactcagccaagccaattatgcaaagacctgggagaagaacatttcaggaagtacaatagcaagagcaaaggtcctgaggcaggaaagaacttgccatgtttgaggaattgaaaagcagtcagtgtgactggaatgtggaaagtaggagggagaatgggatgagatgagattacagaaaaggtaatgaaggggccaggaaaagcaagcctcctaaatatgatggggagtcagtaaagggtttgagcaggggtttatgttttgttgttgctgttacagggtctcactctgtcgcccaggctgcagtgcagtggtgtgatcatggcttgccgcagcctcgaactcctgggctcaagcgattctcccacctcggcctccctagtagttgggactgcaggtccgtgccaacacacctggcttaatttttaatttttgtccagatgaagtgtcccggattctgctgagagcaaaatacagaacaacagcaacaacaaaatagaaacaaagaggacgagcatggtggctcacacctgtaatctcaggactttgggaggctgaggcaggcggatcacaagatcaagagatggagaccatcctggccaacatcgtgaaaccccgtctccactaaaaatacaaaaattagctgggtgtagtggcgtgcccttgcagtcccagctacttgggaggctgaggcaggagaatcacttgaacccgggaggcagaggttgcagtgagccgagatcgcgccactgcactccagtctggtgagagagtgagactctgtcccaaaaaaaaaaaaaaaaaaaaaaaaaagacagaaagaaaaagagcaagataaaacaaaacaaaaaattaaaaacttttttttttttttttagataaaaggacatggcatctccctgtgttgcccaggctagtctcaaactccaggactcaagtgattaacctgcctcggcctcccaaagtgctgtgctgagattataggtgtgagccacccaccatgcctgacctatttgggttttgagaagatctctttggctggggagggagaatggattgaaggggccaagtgtaaagcaaatagaacaggaattacaggagttcaggtggaagacagtggtttggcctagggtaagagcagtggaggtggaaataaggagcaaattcaagatatacttttatttttttaaattttttttttttgagacggagtctccctctgccacccaggctggagtgcagtggtgcgatctgggctcactgcaagctctgcctcccgggttcaggccattctcctgcctcagcctcccaagtcgctgggactacaggtgcccgccaccacacccggctaatttttgtatttttagtagagacaaggtttcgccgtgttagtcaggatggtctcaatatcctgacttcgtgatccgcccgcctcggcctcccaaagtgctgggattacaggtgtgagccaccacgcccggccgttttttatttttatttttattttttattttttttgagacggagtctcactctgtagcccaggctggagtgcagtggtgtggtctcggctcactgcaacctccgcctcccgggttcaagtgattctcctgcctcagcttcccaagtagctgggactataggcgcgtgccactacacccggctaattttttatttttagtagagatggggtttctccatgttggccaggctggtcttaaactcctgacctcaggtgatccaccggcctcagcctcccaaagtgctgggattacaggcgtgagcccccacacccagcctcaagatatattttaaagacaggctggacatggtgactcatgcctgtaatcccagcactttgggaggccaaggtgggcagatcacttgaggtcaggagttcgagaccagcctggccaacatggtgaaaccctgtctctactaaaaatacaaaaattagccaggcatggcagcacatgcttaaagtcccagctattcgggaggctgaggcgggtgaatcacttgaatccaggaggcagatgttgcagtgagccgagatcacaacactgcactccagcctgagtgacagaccgagaccctgtctcaaaaaaaaaataataaaaataaaaaaagataatactgacagtgcttgctaataggctatacatggaagatgaaaaaaaagaggaatcaggatagcttcatggtttggagttgggcagccaggtggacgaggggccattttacagaccaggggcatggagggagatgcagttgtgatgggggacagcctaggagacttccatctgtgacaatcccagaggaatcattgggtaggaagttgaatatctgcatccagattcattcacacaggcacagggaggagactgggctagggttatggttatgtacatgggagtcatcaacagtatgtaatatttaaagccaagagattcaaaaggatcatctagggagagcgtgcagatggagagcgctaaaagcgcaggaaggagcccctgagaactccttcagcaaaggagactgggagtaagcggagagaggatagtgcatggagaggacaccggatgctggaggacatcatcttcatcattgacgggaccttcgccaataacacatgccacagaaattagtactcacccagataaagggagtaaagaggaaaatgatggtgcaaaactgcgttcatggccgggtgaggcagctcacacccgccgtctcagcactttgggaggctgaggcagaagggtcgcttgagtccaggaccttgagattagtttgggcaacataggaagaccctgtctccttctcttttttttttttttttaattttttgttttgttttatcttgctctttttattttttaaatttttgttctgtgttttgctctctcagcagaaccagggagagcccatcttaacaaaaatttaaaaattaggccgggtgcagtggctcatgcctataatctcagcactttgggaggccgaagcgggtggatcacttgaggtcaggagttcacgaccaggctggtcaacatggtgagacaccgtctctactaaaaatacaaaaatcagccaggtgtggtggcacacacctttaatcccagctactcgggaggctgaggcaggagaatctcttgaacctggaaggcagaggttgcagtgagccaagatcgtaccactgcaatccagcctggaaaacaaagtgagactctgtccccaaaaaaaaaaaaaaaaaaaaaaaaaaaaggccgggcgcagtggctcacacctgtaatcccagcactttgggaggctgaggcaagtggatcaactgaggtcggaagttcaaaaccagcctgaccagcagggcgaaaccctgtctctactaaaaatacaaaattagctgggcatggtggtacatgcctgtaatcctagatactcggaggctgaggcaggagaatcgcttgaacctgggaggcagagtttgcagtgagccgagattgtgctattgcactccagcctgggtaacaagagcgaaactccatctcaaaaaaactaataatagaataaaattccctagaagcagatctgagataaaggtttgtttgtgagtaatttataaaggaaaggctcccaagagaaactggtaaagggagtgtctttcttgctgccttggatggtcttgaactcctggactcaagagatcctcctgcctcccagagtgctagaattacaggcacgcgctgccatgcctgtcctggtaagggaatttctcacagtaagggaaagtagaataggaaaggagaaggagctaaaaggagggtgatgggccgggtgtggtggctcacatctgtgatcccaacacattgagagaccaaggcaagtggatcacttgagcccaggagttcaaggctgcagtgagccatgattgcaccactgcactccagtccgagtgacggagacaccttgtcttaaaaaagaaaaaaagagagatgggtgattttaggtaaggtctcagccttagcctgatctgcatggagttctggagaataaattgtatctccaagtttgttcctactcaaggcaagggagctgggcctcatatcacagcacttgtcagtcaagacaagtaacacagtaagacagtaagctcctagcctctttgtgtttttaggcagagcagttccagtagcctgaggacaattcttcaaagagaatatagatgtaagcctttggaagcaaaagcccagagaatccagggtggtgacccacagaagtggtcatgggacctttcagcatgtggagggtgcacctggagtgtccactaacactccatgtaggcatttaaaatgtttcttaggggtcaggctcggtgactcatgcctgtaatcccagtactttgggaggccgaggctgatggatcacctgaggtcagcagttcaagaccagcctggccaacatggcaaaactctgtctctactaaaaaataaaaataaaaaaaattagccaggcatgctggtggacgtctataatcccagctactcagaaggctgaggcaggagaatcacttaaacccaagaggtggaggttgcagtgagccaagatcacaccatggagggtggagacgtgtgggaagagacagatggaaagaagactactgaaaaggttaaaaaaaaaagtatgggtgggaagtgaggaattaattctgtggcagtggggacagacaggagagccagactggaaaaaaacccagctataccagcttggaaaagttacttagcctctctgggcatcaaattattcacctgtgaaatgggtcaattacaataatagtgaaaaaataataatagtaaggccgagtgcagtggcccatgcctgtaatctcagcactttaaggccaaggtgggtggatcacctgaggtcaggagttcgagaccagcctggccaacgtggcaaaaccccatctctactaaaaatacaaaaattagctgggtgtggtggcatgcacctgtagtcccagctacttgaaaggctgaggccggagaatcgcttgaatcaaggaggttccactgagctgagatcacgccactgtactccagcctgggcaagagagtgagactcagtctcaaaaaatacaaaatattttttaaaaatgataatggtagtgacatttattgagcactttactgtgatccagctacagactgttccaaagactttgcaactgttatttttgcttaatcctcacaacaacctatgaggtaggcacatttattgcccccatgtgaccaagggagactgaggctcagggaggttaataatttgcctaggcacagtggctcatgcctgtaatcccagcgctttgggagacccaggcaggcagatcacttgagcccaggagttcaagaccaagctgggcaacatagcgagaccctgtcgctacaaaaattacaaaacaaattagccgggtgtggtggtgaatgcttgtagtcttagctacttggggggatgaggattgcttgaacccgggaggttgaggctgcagtgagccatgttcaagccactgcactccagcctggatgacagagtgagaccctgtttcaaagtaaagaaataaataaacaacttgcttgagttcccgcaggtagtcctttccccaaaagattgtaggaaacactaaatggcagccataaataataattattggctgggtgcagtggctcacacctataatccttgcactttgggaggccaaggcaggaggatcccttgagccccagagtttgagaccaccataggaattatagtcctaagatccccatctctattgatctggagctattttcactaagctttgaaatttcccatcaacctcaatctccatcaacacacactaatcctgctgactttgttctcattctcgccgcccttgtactcccctcccctccacactccccttccctccatgaatacctgacttctgccactcctcagccccctctaagctctttctcaaaactaccctctaaggccagcaccgtggctcacccctgtaatcccagcactttgggaggccgaggcaggtggatcacttgagatcaggagttcaagaccagcctggccaatatggtgaaactctgtttctactaaaaatacaaaaattagcagggcatggtggtgcatgcctgtagtcccagctacttgggagactgtggaaggagaatcgcttgagcccgggaggcagaggtttcagtgagccaagattgcgccactgcactccagcctgggcgacagagcaagactccgtctcaggaaaaaaaaaaaaaaaagaaagaaagaaagaaagaaaaaacaccctctactcctttgattcaacaatatcaataatttccccattttattaacagatactatttactgatgccatcaatgttggcagagcgcttacttccagttggggaccgtgctaagcccggtggtacctaaagtccttgctctttaggaggttgcaattaaaatagagttagggacaagtcaacaaatacaaaagagagatcattgcaaattgtgacttaggaatcaaatggagcaggatggcagtgaatacaggtgggtaccatgtttggtgaagcatcagggaaggcctctctaaggaggcaccttggtcctgggaccaagaagaggcaggtgtgcaaagaccttgaaacagagcagagggaagcatgagtcagaaagccctaaggaggaaacgcaaggttcccagcccggtgccatgtgctttacacaaaacttttccttttcctgctagtaaatcccgtcctttccgggagttaatactccctttcaatcttggctcctctctgcttcctgcaggtggggcaccacagtagctgcccagagcctgggagggtcagccataacccagctccgaaggtacaataaccacccttttttgagtgttactatactcaaacatagagcatgagtgttactacactcaaacatagagcacgaaggccttaggccaacaagaagttgtggccagtgggtcaaagcccaagaacagtcttcaatactattaatatttaatttttttgttgaagctcaatttatgcatctggatgaatttctatccctgtatacacccatgagaccaccaccgtgttcaacatatagtgtttccatcactcgagaaattttcctcatgcctcttcccagttagtaccctcctgagaaggtggtcatttttttttttacacttttctccatagttttgtgtttgtttgtttgtttgttttgagacagagtatcactccgtcacccgtgggcagatcacgaggtcaggagttcaagaccagcctggctaacatggtgaaaccccgtctctactaaaaatacaaaaattaactggggctgggtgaggtggctcaggcctgtaatcccagcactttgggaggccaaggtgggtggatcacgaggtcaggagatggagaccatcctggccaacatggtgaaaccccatctctactaaaaaaatacaaaaattagctgggcgtggtggtgcatgcgcctttagtcccagctactcgggagggcgaggcaggagaatcgcttgaacccaggaggcagaggttgcagtgacccaagatcatgccattgcattccagcctgggcaacagacccagattctgtctcaaaaaataaaattaaattaaaaaaagaacaaagacattctcctatgcaacggcagtatcacacacaggaaatttatcattgttaaattagcactggtctctaatattcagtctacattcaaatttctccaattgtcccaataatgtcctttgtagatttttttcttttcttttcttttttttttttttttgagacggactcttgctctgtcgcccaggctggagtgcagtggcgcaatttgggctcactgcaagctccgcctcccgggttcatgccattctcctgcctcaccctcccaagtagctgggactacaggtgtccgccaccatgcccggctaattttttgtatttttagtagagacagggtttcaccgtgttagccaggatggtctcgatctcctgaccttgtgatctgcccacccgggcctcccaaagtgctgggattacaggtgtgagccaccgtgcctggccgatttgttttctttttggtcctgagtccaatcaaagatcgcctgttacatttagttgctatgtctctttaatatcttttaatctgggcagtttccttacctctcttttttttttttttttttttttttttttttttgagacaggatcttgctctgttgccctggttggagttcagtggtgcaattttggctcactgcaacctctgcctcccaggctcaagtgattctcctacctcagcctcccaagtagctgggaccacaagcacacgtgccaccatgcctagctaattttgtgttttttgtagagatgaggttttgccaaattgcccaggctggtctggaactcatgaggtcagcctgcctcagcctctcgaagtgctggggttacaggcatgagccaccatgccaggccacctctttttgatgttgatgtgtctgaaaactccaggtaacttattctgcagaatgtcgttcaatttgggtttgttaatgtttactcatcatgatctagattaaatatttatgacaggaatcaaggatgtgatgtcatatccttcccagtgaatcgtatcaggaaaaattattgttgttttgtttcattattattattttagagacagggtctctctctgtcactcaagctaggttgcagtggcacagtcacaactcactgcaatgtgtatgttgttcgtttgtttctttgtcttatttattcatctttttttttttttttttttggagacagagtctcactctgttgcccaggctggagtgcagtggtgcgatctcagctcactgcaacctccacttcccaggttcaagcgattctcctgcctcagcctcccagtagctgggattacaggtgcgtgccaccatgcccagctaatttttgtatttttactagagatggggttttgccatgttggccagtctggtcttactgacttcaggtgatccgcccacctcaacctaccaaagtgttaggattacaggcgtgagccactgcgcccaggctttatctttatttatttatttttagagatggggtctgactcacccaggctggccttgaactcctgggctcaagcaatcctcctgcctaggcctcccaaagtgctggattacaggaatgagccaccacaccctgctttgtctcattattgatgatgcaaggcaattactttttttattttgataagatatatcattttaacctttttttttttttttttgagactgagtttcactcttgttgccaggctagagtgcagtggcgcgatctcggctcactgcaacctccacctcccaggtttaagcgattctcctgcctcagtctcccgagtagctgggattacaggcacccatcaccatgcccaactaattttttgtattttaagtagaaaccaggtttctccatgttgtacgggctggtcttgaactcctggcctcaggcgatccacctgcctcggcctcccaaagtgctgggactacaggcatgagccaccgtgcccggcccattttaactatttttaaatgtacagttctgtggtgttaagaacattcacattgtgatgcaacaatcaccaccatccatctccagaacacgttcatcttccccagctgaaattctacccatgacacattaactccccatgttctctccccaccagtccctggcaagccccttctactgtctctatgaatttgatgactctaggcacctcatacaagtggaatcatataatatttgtctttttgtaaatggatgatttcacttagcgcaacgtcctcaagcttcatctgtattggagcacgttccttgccttttaaggctgaataatattccactgtatgcatatatcatatttcatcaatgtgtccatcgatggacacttgggttgctgtcaccccttggctatgctgctgtgaatgtgggtgtacgcatatctctgaaagaccttgttttcacttttttggggcatgtacccagaagtggaattgctgactcatatagcagttctatatttagatttttgaggaattgccgtaccattttctgcagcagctgcaccattttatgttcccatcagcaatgcacaaggggttcaatttctccccattcttgccaacacttatttttctattttctataatagctagcctagtgtgtgtgaagtagcatctcattgtggttttgatttgaatttccctaatgattagtaacgatgaccatctccttatgtgcttgttgtccatttctgtatcttcttcttttttttttttttttttttaattttgagacagggtctcactttgtcgcccaggctagagtgcagtggtttgatctcggctcattgcaacctctgcctccagggttcaagagattctcccacctcagcctccctggtagctgggactataggcatgcgccaccatgcccagctaatttttgtatttttagtagagacagggtttcaccatgttgggcaggctggtttcgaactcctgacctcaagtgatctgcccgccttggcctcccagagtgctgggattataggcatgagccaccgtgcccagccatttttctatcttctttaaagaaacactggccaggcacggtggctcacacatgtaatcccagcactttgggaggctgaggcaggcagattgcttgagcccaggaggtttgagactagccttggtaacgcggtgaaacttcttctctatacaaaatacaaaaactagctgggtgtagtgtgtgcctgaagtcccagctactagggaagctgagatgggaggactggttgagtccgggagatagaggctgcagcaagctgtgattgcgccactgtactccagcctgggtgacagagtgaggccttgtctcaaaataaataaataaataaaaataaagaaacatctgttcaaggctttgcttttttttttttttttttttttttgagactggcctggccttgttgtgttgcccaggctggcctcaaactcctgggctcaagcaatcctcagcttcccaagtaggtgggactacaggcgcataccaccatgcctggcttcttttctttgtctacttttgaattggattgtttgtttggttgttgaattgtaggatttctttatatatactggatattaatattttatcaaatacatgttttgcaactattttcttccattctgtgagttgtcttttcactgtcttgtctcttgttgtgtggttttaaaaatttttttaggccggacacggtggttcacacctgtaatcccagaattttgggaggccgaggcgtgcaaatcacaaggtcaggagttcgaaaccagcctggacaacatggtgaaaccccatctactaaaaatacaaaaaattagctgggtgtagtggcgggcacctgtaatcccagctacctgggagactgaggcaggagaattgcttgaacccaggaggcggagcttgcagtgagccgagatcacactgctgcactccagctcgggcgacagagtgagactccgtctcaaaaaaaaaaaatgttttttagagacggagtctctgtcgcccaggctggagtgcagtggtgtgtgatcatggctcactgcagcctggttgaactcctgggctcaagcgatcctcccacctctagttgttttcttttcttttcttttcttttcttttcttttcttttcttttctttccttttcttttcttttcttttcttttcttttttagatgaggtcttgctctgtcacctaggctgaagtgcagtggcatgatcccggctccctgcagccttgacctcctgggctcaagcgatcttcctgccttaccctctggagtagctggcactacagccatgtgctaccatgcctggctaatatatatatatacacacacacatatatatatgtatatatgtatatatatgtatatatgtatatatatgtgtatatatatatgtgtgtatatatatgtatatgtatataatattttttagtttttgtagagatgagggtttgactaggcccatctggaacccctgggctcaagtgatcctcccacctcagcctcccaaagtgctgggattgcaagtgtgagccaccgtgaccagcctcaccctctctctttttttttttttctgagacacagcctcaagaagtcctgagaacatgtgccttctggccccactctcttgatagtgttttttgatgtacaaaactttttaattttgatgaagtccagtttatctatttttctttcgttacctatacttttagagtcctatctatgaaattattgccgaatctaacgtcataaagatttttttctaagtgtttcatagttttaactgttatgtttaggtctttgatccattttgggtaatatttttgtatatggtgttaggtaaggatgcaacttccttcttttgcatgtggatatccagttttcccagcactatttgttgaagaaactgtcttttctacattaaaaggtagtggctcctttgttgaaaatcaattgatcggctctctctctccctctccctctccctctccctctccctctccctctccctcaccccacggtctccctctcatgcggagccgaagctggactgtactgctgccatctcggctcactgcaacctccctgcctgattctcctgcctcagtctgccgaatgcctgcgattgcaggcacgcgccgccacgcctgactggttttggtggagacggggtttcgctgtgttggccgggccggtctccagcccctaaccgcgagtgatctgccaacctcggcctcccgaggtgccgggattgcagacggagtctcgttcactcagtgctcaatggtgcccaggctggagtgcagtggcgtgatctcggctcactacaacctacacctcccagctgcctgccttggcctcccaaagtgccgagattgcagcctctgcccggccgccaccccgtctgggaagtgaggagcgtctctgcctggccgtccatcgtctgggatgtgaggagcccctctgcctggctgcccagtctggaaagtgaggagcgtctccgcccggccgccatcccatctaggaagtgaggagcgcctctgccccgccgccccatctgggatgtgaggagcacctctgcccggccgagaccccgtctgggaggtgaggagcgtctctgcccggccgccccgtctgagaagtgaggagaccctctgcctggcaaccaccccgtctgagaagtgaggagcccctccgcccggcagctgccccgtctgagaagtgaggagcctctccgcccggcagccaccccatctgggaagtgaggagcgtctccgcccggcagccaccccgtccgggagggaggtgggggggggtcagcccccgcccggccagccgccccatccgggagggaggtggggggtcagcacccccgcctggccagccgccccgtccgggagggaggtggggggtcagccccccgcccggccagccgccccgtccgggaggtgaggggcgcctcggcccggccgcccctactgggaagtgaggagcccctcagcccggccaccaccccatctgggaagtgaggagcgtctccgcccggcagccaccccgtccgggagggagatgggggggtcagccccccgcccggccagccgccccctccgggagggaggtggggggggtcagcccccctgcccggccagccgccccgtccgggaggtgaggggcgcctctgcccggccgcccctactgggaagtgagtagcccctctgcccggccaccaccccgtctgggaggtgtgcccaacagctcattgagaacgggccaggatgacaatggcggctttgtggaatagaaaggcgggaaaggtggggaaaagattgagaaatcggatggttgccgtgtctgtgtagaaagaagtagacatgggagacttttcattttgttctgcactaagaaaaattcctctgccttgggatcctgttgatctgtgaccttacccccaaccctgtgctctctgaaacatgtgctgtgtccactcagggttaaatggattaagggcggtgcaagatgtgctttgttaaacagatgcttgaaggcagcaggcttgttaagagtcatcaccaatccctaatctcaagtaatcagggacacaaacactgcggaaggcctcagggtcctctgcctaggaaaaccagagacctttgttcacttgtttatctgctgaccttccctccactattgtcccatgaccctgccaaatccccctctgtgagaaacacccaagaattatcaataaaaaaataaattaaaaaaaaaaaaaagaaaaaaaaagaaaatcaattgatcataaatacaagggtttattttggggctctctattgtcttctgttggtctctatgtctgtccttatgccagtatcacactgctttcattactgtggctttgtagtaagttgtgaaatcaggaggtatgggtccttcaactttgctcttctttttcaatgttgttttgactatttgaggaatgcaggtactttttaaataggactcctagaggtaccaaggaaaggatgatctataacagctgccgcttacatactttaggaagaatgttgcggctgtgtttggcccatctcatgggtctggtgaccctactgtcttgtctgtactaagaagtatgaatagaatgcatggtctgataaaggtaaaagcattacgttacatagttatatgctatacatatttaactattaaaacatacaaaataggccaggtgtggtggttcatgcctgtaatcctagcatcttgggaggctaaggtgggaggatcacttgaggtcaggagttcgagaccagcctggccaacatggcaaaaccccatctctactaaaaatacaaaaattgtccaggcgtggtggcgcttgcctgtaatcccagctactggggaggttgaggcaggagaattgcttgaacccgggaggcggaggttgcagtgagccgagatgacaccactgcactccagcctgggcaacagagcaagactctgtcttggaagaaaaaaaagagagagagaagaagaaaaaaccctacaaaatagcatggaatcagagatctgagatatctggtctctgtacgcacacataacttcagtttatctgaacacttctgcttgtttctgttctctgctctcctgacccacctcctaccttcgttttcctgcattcagatgctacatgcaagtcatttttatctatttttttcccctgcagaccatttttaaaactctgtgctgtaattgtactgattaaaatcaagggggccaggtgtgatggctcatgcctataattctaacactttgagaggccaaggtgggcggatcacctgaggtcaggagttcgagaccagccagaccagccagaccagcatggagaaaccccatctctactaaaaatacaaaattagctcggcgtggtggcaggcgcctgtaatcccagctgctctggaggctgaggcaggagaatcacttgaacccgggaggtggaggttgcagtgagctgagattgcgccattgctctccagcctgggcgacaagagtgaaactccgtctcaaaaacaaacaaacaaacaaacaaacaaaaaacataaggaatacattcacctggttccaaattcaaaggtaaaaaggcccaggatgaaagtttccgtagcatccctgcctccttcctgccaatttcccctctctggcaacaaccattcttactgctttcttgtattttcttctaaatacatatatttatacgtgtacattcttgagctggatgcagttcaataatgaattctagcaactcagaaggctgaggagggaggacgacttgagcccaggggttcaaggctgcagtgcaggagttcacaccactgcattccagcctaagtgacagagcgagaccccagctctaaaaacaaaacaaaacaaaaatattctgttgcatagccaagtaaaaagaacttcctgacacagcaatagggcagcgcatgctgtggctgctctcccggcacctttgcagtgtgctcctacagattttctcctgccggcaggtatgcacctgcccctgccccagagggattgatgggaactaggaagaccctcagcagccttgtggcaggcagtgagtgggggtgggggttgagattactcccattctggagtgcctgcatccaagctctcaggaggtggcatcttaacaccctgctcccctgcccacccctctggcgaaataactctgggaagccaattctatgctggtgcccaacgcatctccaccagattcagcttcagttgctttcagtagttatttattggatcacccacctgttattggccgccttcccttccctgtctcacttccccattcctttcctgctgtttagccagctcacttcccaaattaagtacttgctctcgaatctttgtctgagtttgctttgagagaaacccaaaggaaggcccatgtatgcactgttctataccttgcttggttcacttaacatgacttggagatactcccctatccctacaccaaggcttcctcattctgttttttttttttttttcttttgagacagggtcccgctttatcacccaggctggagtgcagttgcacaatcagggctcactgcagcctcaacctcccaggttcaagcgatcctccttcctcagcctcctgagtagctgggaccataggcacgtgccaccatgcccaactaatttctacattttttgtagagatggagtttcaccaagttgcctaggctggactcaaactcctgagctcaagtgatccacctgccttggcctccgaagtgctgggattacagacataagcctcattctttttaagggcagcacaatatccccttctgtggacgtgcgtaagaactgggctccggagccagatggcctgcaagtcattcttcatatctaacacgggaccagccatccttccgcagagggcggcctgctttccctccaccttttttactttcatcattgccccgggcacctcttcctgaaatctgggaggcttgcctaactcgttcccatactcttgcacatagtatgtaaattaccacatctacagactggcactcccagttgcgtctgtcttacctagagtttatttgtcctttgctcttttttcccttccctccctccttccttcctattatctgcccactaccctgatcctgggttagaagaacaaaagtttgagaattctcttttcagttttttaatttctcaaagttaaacataattttaaacattggctgttaggattaaaaagttaggagatttcacattggaatctggattttatgcgtctcttgaaaaatcaatgctgtttcatgatagtctcaataaaaaaaagaaaaaaaattaggctgggtgcgctggctcatgcctgtaatccctgcactttgggaggccaaggcgggcaggtcacctgaggtcggatcacctgaggtcaggagtttgagaccagcctgaccaacatggtgaaaccccaattgtactaaaaatacaaaaaattagccgggcgtggtgtcgcgtgcctgtaatcccagctattcaggaggctgagccaggagaatcgcttgaacctgggaggcagaggtttcagtgagccgaggtctcaccactgcacttcagcctgggcaacaggagtgaaactccatcagaaaaaaatcataagtcccagcaatgcctctgttctggcgtgaccacagtcacaatctcctgggccagagctaaggatcccctgtccccttggggtgggggcatctctcaaccattcaccactccccacaaagaggcctcctcacttatttatgggacctccctagcccagtaggtgactggatgtgaaacgcctggttcaggtccttattaatgcaaacttgaagtatttatttaattatttttttgagacagagtcttgctctgtcgcccaggctggagtgcagtggtatgatattggctcactacagcctctgcatgccgggttcaagcaattctcctgcctcagcctcccaagtagctgggattacaggcgcctgccaacacacccagctaatttttttttttttttttttttgagacagagactcactctgtcatccaggctggagtgcagtggcacgatcttggctcactgcaacctccacctcctgggttcaaatgattcttgtgcctcagcctcccgagtagctgggactacaggcgctcgccaccatgcccagctgattttgttttgtatttttagtagaaatgggatttcaccatgttggccaggctggtcttgaattcctgacctcaagtgatccgcctgcctcggcctcccaaagtgctgggattacaggcgtgagccactgtgcctggcctaatttttgtatttttaatagagacaaggtttctccatgttggccaggatggtcttaaactcctgacctcaggtgatcctcccaccttgacctcccaaagtgctgggattacaggtgtgagccaccaagcccggccaagcttgaagtatttctattacttaaagtgaaaatgcagatcctaatttcggcactttgggaggctgaggcaggaggatcacttgggccaggaagttcaagactacagtgagctatggtggcaccactgtgctccaggctgggccacagagcaagaccctatctattttttttttttttttgagatggaatttcgctcttgttgcccaggctggagtgcaatggcacgatcttggctcactgcaacctccacctcccaggttcaagcgattctcctgcctcagcctcccaaatagctgggattacaggcacgtaccaccacacctggctgaccctatctcttaaaaacaacaacagcaacatcatcaacaacaatacccagattccgattcagtagatctcggtggggcatgagattccgcatttctcacaagtttccaggtgatgctggtgttgctggtctacagaccacaccttgaggagcagggacaagccagtctccttcctcccccatcgattttgcacatcactggggatttatttttctagtacattatgtttctagaattccagtggttgttgaatatccatggcagttactgtttactgtttgttttttttttaaagcacaggatctttcggcttcccaaacagtgttactgctcagatccctgtgcacagtgtacaagtcagatctaataggtgctaactgaagtcaaagagaaggccctggaaaatatcactctgaaatccacctccccactccctgatccccaggtccctgtgtccaaaccacaggaatttgaaactgtggaactcagctaaaaatcagagatcttattctggtattccaaggacttaggagttaagtaacttgcccaagattacacagctgcaaaaccccggatctcccaaaccctttgcatttttgtcctaaggccacagtcacagcatttcctaccaaagcccagcccagatccacccactttctgatttttcttgccttattcacacctgagaataaacacctctctgccagttaaaactgtattttcaaacagggttaggctctgtggctcacacctgcaaccccagcacttttggaggctgaaagagttcaagaccggcttgggcaacaaatcaagacccctgtctcttaaaaaataaaaaaattgggccgagcgcagtcgttcacgcctgtaatcccaacacgttgggaggccgaggcgcgtggatcacctgagatcaggagtttgagaccagcctggtcaacgtggagacaccccatctccactaaaaatacaaaaattagccaggcatggtggcacatacctgtaatcccagctactcgggaggctgaggcaggagaatcacttgagcctggaaggtggaggctacaatgagctgagatcacaccactgcactccagcctgggtgatagagtgagactttgtctcaaaaaagaaaaagaaaaagaaaaataattagctgaacacggtggtgtgtgtctgtagtcccagctattcaggaggctgaggcaggaggctgtagtaagctatgatcatgccactgcactcctgcctgggtgacagagaaagactctgtctcaaaataaataaacaaaaaacaaacaaaacagggtttataagtagtaagaaaaggcagttggtgtcttttccccctcttctgtcctccagttgtctccaaaatggtgcatttatcttagacaaggtgacaggtggggggcagggaacggaggggtggcacaaaatggtgcatttggtaaaacactgaagacaagcttactccaggataaaactggcaaaaggttgaagaccaggttactccaagataaagttctacctccttcaccgcctggtctccaggtctgcatctcctggtcacagtctctgcaaggtaagcttttaccttatctctctgcctgttccagggaagcctccttcctgccaagttggtgttcaccttcacctgaattcacccttgttttcctgcctaccatggggccatgggggcccttgttcactccatctcctatatgctgagaatgcccttgtttaatgaggcttttttttttttttgagacagggtctcactctgttgcccaggctggagtgcagtggcactatcttggcttactgcaaactctgcctcccaggctcaagtgattctcctgcctcagcctcctgagtacctgggattacaggtgtgtgccaccacacccagctaatttttgtatttttggtggagatggggttttaccatgttggccaggctggtctggaactcctgacctcaggtggtccacctgcctcagcctcccaaagtgctgggattgcaggtgtgagccaccttgcccagctagtttaaaatttttattttatttagagataggatcttactctgttgcccaggctggagtgcagtggcataatcatagctcactgtaaccttgaactcctgggttcaagcaatcctcccatgtcagcctccccagcaggcaggactatggcatgcagcaccatacctggctaatttttgtatttttgcagaatcaggggtctcactatatgtccaggctagtcttgaactcctggcctcaagtgattctcctgccttagcctgtcagggatctgggattacaggcatgagccatgcccggccatatttaatgggttttgttctgtttttttaagatgggatcttgctctgttacccagactggagcacagtggtgagatcatggctcactgcagccttgacctcctgggctcaagcagtcctcctgcctcagcctcccaagtagctaggaccacaggcatgcaccatcacttccagatttttttttacttttctaagagatggtgggggcagggagtggggaggtctctccatgttgcccagactggtctcaaacttctggccttaagtgatcctcctgcctcagcttcccaaagtgttggaattacagtctaagctactgtacccagccaagatatttaaagtgacaaagagattttttttgttgttgttgtttttgttttttgttttttttattgagacagagtctcactctgttgccaggctggagtgcagtggtgtgatctcagctcactcactgcaacctccgatttctgggttcaagcgattctcctgcctcagcctcccgagtagctgggattacaggcacacaccaccacacccggataatttttgtatttttattagagacagggtttcaccatgttggccaggatggtcttgatctgacctcatgatccacctgcctcagcctcccaagatgctgggattacaggcgtgagtcaccgtgcccgacgatagtctttaatggatgtaagtgggggtattttggaaattaacagctcttttcccatgtctttttgaggttgtggctcatcagagacaaaaaaaagcatctttttttaggtttgtttttttttttttttgccacctgtccttgttggtccaatccctacaagagaagggaaatgaggaactcttcttaagctttggactctgtatggtagactttacatgtgaaaaattagataaagtgaacaattacatggaaaaatatcattaccaaaattgttcaagaagaaacatagtaggccggctgtggtggctcacacctgtaatctcagcactgggaggctgaggtgggtggatcacctgaggtcgggagttcgagaacagcctggccaacatggtcaaacccgtctctactaaaaatacaaaaattagctggacatggtggcaggcgcctataatcccagctactcaggaggctgaggcacgagaatcgcttgaacccgggagacagaggaatagaatagacttacatataagtaaaattgaatctgaataaaaaattctagtgagaaagaaaattataaccacaaaacacttcaccaagcccagatgtcctcacaggcaacttttataactttaaggaacagaaaacctccatcttacccaaactaagaaacaaaattcaacaacccatgtgaatctagtcactagctactgtaagggaaatctcacacctagccaaaaacattaaaaaaaaaaaagtaagaaaaggaaaccaatagttcagtttcacctacatagatgcaaaaattatgaataaaacattagctagccaaatacaactatgtgtaaaacaaacattaccaatcagtatttatcccaggaaggcaaggacgttattttaccattagaaagtagcaacatagtgtaatcccagctattcgggaggctgaggcagagaattgcttaaactctggaggaggaggttgcagcagtgagctgagatcgcaccactgcaccccagcctggacaacagagtgagagtacgtctcaaaaataaaataaaataaaataaagtaagtagcaatacagctgggcttggtgctttgggcctgtaatcccagctactccggaggctgaggcaggagaatctcttgaacccaggaggcggaggttgcagtgagccaagatcacctcactgagctgtctagcctgggtgacagagtgaggttccgtctcaaaaaaaagaaaaaaaaaaaaaatagaagccgggcagggtggctcatacctgtaatcccagcactttgggaggctgaggtggtcagatcacctgaggtcacaggtttgagaccagcctgaccaacatgtgaaacctgatctctactaaaaatacaaaattagtcgggcgtggtggcacatgcctgtaatctcagctatttgggaggctgaggcaggagaattgcttcaacctgggaggtggaggttgcggtgagccgagatcgcgccaccgcactgcagcctgggcaacaagagggaaactccgtctcaaaaaaaaaaaaaaaaaaagcaaaataaacgcactgcagcctgggcaacaagagggaaactccgtctcaaaaaaaaaaaaagaaaaataaaaaaataaataaaatgtaaatccttttgtacattttcatggaaaaccataaataatatgagaagaaaagctacaaattaagagatatttgtaatgtatataactgagaaagaattgatatccaaaacttttcttttattattattattattatttttcaaaatatttttaaaacctacaaataggcccagcgtggtggctcacacctgtaatcccagcactttgggaggcggaggcaggcagatcacttgaggtcaggaattccagaccagcctggccaatatggtgaaacaccatctctactaaaaatacaaaaattagcagggcgtgatgatgggcacctgtagtcccagctacttgggaagctgaggcaggagaatcgcttgaacccaggaggcagaggttgcagtgagctgagatcatgccactgcactccagcctgggcaacagagactccgtcttaaaaaaaaaaaaaaaaaaaccccagaaccccccccataaaaaaaaaaaaaaccactacaaataatgagaaaaggacaaaccatccaaaaggaaaatgaacaaaggaatgatttctatgaccaataaacatatgaaacatataaacagacaaaaagaaactcgatctctgcagtaattagggaaatgtatattaaaacacaaagataccatcttacatccttcagatcggcaaatattagcaagcctgcctatttaatcaaaaatgcattaggcagctgggcacggtggctcatgcccataatcccagcactttgggataccaaggtgggaggggaggactacttgagctcagaagtttgagatcagcctggacaacatattaaaaccttgtctctactagaaataatttttttttttttgagacggagcctctctctctcccaggctggggtgcagtggcacgatctcagctcactacaaccttagcctcctgggttcaagcgattctcctgcctcagcctcccaggtagctgagattacaggcgtgcgctgccatgcctggccaatttttttgtattttaatagagagggtttcactgtgtttcccaggctggtctctaactcctgagctcaggcacgccacacgcctcggcctcccaaagtgctgggattataggcgtaagccaccgcactgggcagaaataaaaatttttaaaaattagccgggtgtgatggtgggcacctacagtcccaggtattcaggaggctgaggcaggaggattgcttgagcctgggagatcaaggctgtactgagccgagatcacacccctgcactccagcctgggcaacaaagtgagaccctgtctccaaaaaaaaaaaaaaaaaaaaaaaagaaagaaaagaaatgcattaggctacaagcagtagaagatctaactaaatgactcagacaaataggaagttctttttctcacataacaagtctgtggccaggcgccgtcgtgtgagcttgtggtcccagctactgaggaggtgggtgggagaatcacctaaactcgggaaggttttagctgcagtgagctgtgatcgtgccactgcactccagcctgggcaacagagtgagaccctatctcaaacacacaaacaaacaagaattctggaggtaagtgacgtgagcatcggttcaattgctcagccacacgttgttgaggtagctgatgtgctccctgacatctcacccattttaaagccataatcagagaagagcaagactaaggcatcagcatgctttgtcagaaaagcaaaagctttaaatggcttccagccaacttttgctatacaaaatacttcaaacatccagaaaagaaccgaaaatgatataactcccacatgtgtacctatgatcgattctgaacaaacactgatgttttgccaattgtgcttctattttttttccttaataaaacacgagagacacagtgtccaggattgcattatgtggccaccccagatgaaggggagatgagaatgtgagtgttccgttttctaatatgtataatacaggtaggctgggcagaaagagttagacaggtattgggttagccagcctacagtgtctaacacaccaacaaaatcaagcattggagagcatttggatatggaagagtgctgagaaggtgtggtggctcatgcctataatcctagtactttgggaggctgaggcaggaggatcacttaagtccaggagtttgagagcagcctgggcaacaaagtgagaccttgtctctacaaaaaataaacaaaattagctggtggtggcacctgcctgttgtcccagctactcagggggctgaggtgggaggatggcttgagcctgggagattgaagcttcagttagccatgatcatgccactgcgctccagcctgggtgacagagagagatcctgcctcaaaaaaaaaataaaaataaaaaagaggggccgggtgtggtggctcaggcctgtaatcttagcactctttgggaggctgagactggaggatcctttgagcccaggggtttgagaccagcctgggcaacatagggagaacttgtctctatttaaaaaaaaaaatgctcatacgtggttggcaggagtgtaaatagcctcaaccaatttggaaagcaatttgccaatactagttaatataacgatctagatagtgggcaacccggattagccttttccagatatttgcagctgggaagctctcatacatgttcacagagatacctgcaaatgttcatttcagctttttttttttcaatggcaaaaaactggaaatagcctatttgtccctcaataagagaactaataaatacatctcacaatatacaatcaaaggaatactatgcagctattaaaatgagtgaacttatcaacatgcataaacctttaagacataatgctggttaaagaggcaagttgcagaaaggtacataaggtatgggactatttatgtaaaatcaaatgcacacagagtgacactgtctttattgattcttgcatttgtaataaaggtgcaaactggggaagaaacacactaacatcatagcagcagcaatctccagggaaggaaagagacctgtgaggaaaggtgacgatgagaggaagaaactatacctctaatgttgcattaaggaaagaaaggctaggcccagtggcttccgcctgtaatcccagcactttgggaggccaaggtgggtggatcacttgaggccaggagttcatgaccagcctggccaacatggtgaaaccccatctgtactaaaaatacaaacaatttgccgggcatgatggacatacctgtggtcccagctactcgggaggctgaggcatgagaatctcttgaacctgggaggcggaggttgcagtgagctgagattgcaccactgccctccagcctgggtgacagagtgagactctgcctctaaaggaaggagagaagaaaatagatctgaagcaaatttatcaaaatgctaacttttgctgtatctgtgttgtaggttcctaagcatttgccataatgttctcattatttctttggctatttataatacttcataaattaaaaataaaggaaggagatgtggtattttttctgaagcagcacttctcaaactttcatgtacaatgtatcccctggggatcttgttaaaatgcagttgctgagtcagtggcctgggatggggccggagaatctacacgcctcacaagctcctgtgttgggatgaagctggttccagggccccacttaaagaagcagccttccagagaactctgccccagggctcctgagatggaagtgaaggccccagcccagaggaccctgcgtgaaggttcagtgttggagcctgcagatgctgacagtgcctgcagctttcctgcctattttaggacttgctagaagcttggcatgtcctaaaaaccctttttcaagagtctctccccagctgctgctagcgggattttttttttaactctctatcctatttaacctcctcactgatgaccttttaatgcgtaacttttttttttttttttttttttgagacggagtctcgctctcccaggctggagtgcagtggtgtgatctcggctcactgcaacctgtgcctcccaggttcaagcgatctcctgcctcagcctccccagtacctaggattacaggtgcgcgcctccagcatagctaatgtttgtatttttagtagagacggggtttcaccatgttggccaggctggttatgcataactttttatcacagatgtttgatctcagttttaatcttttcaacatttgtaaacccttggttcattgtgcttctccctttattactcttttttttttttttttttttttttttttgagacggagtttcgctcttgttgcccaggctggagtgcagtggcgcactctcggttcactgcaatctccacctcataggttcaagcgattctcctgcctcagcctcctgagtagctgggattacaggcacacgccaccatgcctggctaatttttctttttcttttttgtatttttagtagagatggggtttcactatgttggccagactggtcttgaactcctgacctcgtgatctgcccacctcagactcccaaagtgctgggattacaggtgtgagccaccgtgcctggcctaattttgtatttttagtagagacggggtttctccatgttggtcaggctggtctcgaactcctgacctcaggtgatctgctcgtcttggcctcccaaagtgttgggattataggcataagccaccacaaccgacctgactgctcatttttaaactcttgatctgacactgggggactttaagctataatcttgttctgttttttttctttttctcttgccttctatgctttccattttattgctttatttatttattgagacagggtctcactctggagtgctggagtatggtggcatgatcagggctcactgcagccctgacctccagggctcaggggatcctcccacctcaccctcccaagtagctggtactacaggcacataccaccatgcccagctaattttctaattttctgtagagatgaggtctcactgcattgcccaggctggtctcgaactcctgagctcaagtgatcctcctgccttggcctcccaaagtgctgggattacaggcatgagccacagcacccagcttccctttttctctcaggacttattttcacattggctggggtgtgggtgggccgccgccattttatattcccagcttccttctggctccccaggaatcctcagctggggtgaggatgacactgaacgaatctcacattccccaggagactgggaaaaacaactgcttcagttctctgtcggatcacaggctctagcttgcatattcgatttgctggggcagtgttgatgtctcctaccctgcaggcccatgtaagaagatgcatgtcatgaattccatgcactctttggattgggaggcaacaaacactgatgagaatcaggaggggctgaagaggagccaggggatctagggtcacccagacatctctgggaggcagttcactcagggtatggtggtcatatctgggctgctccatggaggcactggcatcaggagcttaaaacagactcctgtgttcccttttgtgctcatcagcaatgtccttggtgcctggaccggtttagtagagaaggagatgttcctgcttttatttctatttttttttaaacaagttttcgctctgttgtccaggctggaatgccgtgacaaagccacggctcactgcacccttgacctcctgggctcaagcgatcctcccacctcagcctcctgagtagctaggactacaggcgcactctgccacacctggctaattaaaaacagttattttgtagagatagagtcttgctatgttgcccaggctggtcttgaactcctgggctcaagtgatattcctgcctcggtctctcacagtgctggggttacaggcatgagccaccatggccagctactcctgccctttaggttttggctcatttctcttccccaggggaaactggggcaggatcatggcagggcctggcatgcaacccttgctggcacagcactgtggtaaggggcatgggctctgaagttcaagtggagagaataccccttatgaactgggtgtccttggccagcacttaacctctttgtgcctcaatggccctctatgaaggataacagtagacctgtcttgtaaggttattgtgaagtaaaacttgtagaatggagcttggcacagagtaagcttcaatcaatgtcagctcttcattacccaaccttggcgctgcatgacgaacacctgtggatggttaaaaactgcactgcaggttacttccctcagagcctctggggtgggacccaggcttccgtatttttttttaagccccttaggtaatttcattgtgtgcacagggctgaaaactgcctgaggctgcagtctctcaagtgctagttcacacagatatttatttatttattttttgagacagagttgcgctcttgtcatccaggctgaagtgcaatggcgcaattttggctcactgcagtctccgcctcccaggttcaagagattcttcttccacagcctgccgaatagctgggattacaggtacgcgccaccatgccgggctaactttgtatttttagtagagacggggtttcaccatgtttcaccatgttgtccaggttgctctcaaaatcccgacctcaggtgatccacctactttggcctcccaaagtgctgggattacaggcatgagccaccatgcccggccacacacagataaatttaaacgttccctacaggtctttgttgggtccttttggaagcaactcctgcccccgtgccccacaaaggagcattttcttgtatgtgtcagaatcatttctcttttcccctaccccactgcaaaccccacccaagttcagaagaaaaataccttcaagaactctgaccagatagaggaaaagtgcattgactcaatctacctccttcctcactcccttcttggaggaggccccttcccaaaagaccttcctggaaaaatcttcctttggtgtctccaaggaactatgctctccagggcacgcaacaacagagtaagaattcatctaccactaaagactgaatatagtatgcagtataaaactatttaaaagggccagacgcggtggctcatgcctgtaatcccagcactttgggaggccgaggcgggtggatcacgaggttaggggttcaagacaagcctggccaagatggcaaaaccccatctctactaaaaatacaaaaattagccgggcatggtggcggacacctgtaatcccagctactcaggaggctgagacagagaattgcttgaacccgggaggcagaggttacgagatcacaccactgtattccagcttgggcgacagagcaagacttcatctcaaaaaaaaaaaaaaaacttatttaaaagaaggcgccaggccagggtcggtggctcacgcctgtaaatcccagcactttgggaggccaaggtggggcagatcacctgaggtcaggagttcgagacgagcctggccaacacggtgaaaccctgtctctactaaaaatataaaaattagccagatgtggtggtgcgtgcctgtaatcccagctactcaggaggctgaggcaggaggatcacttgaacctgggaggcggaggtcgcagtgagccgagatcacgccactgcactccagcctgggtgacacagcaagactccgtctcataaataaataaataaggcaccataacaaaatacagtttatcctaaacatggtttaatagttgggaagttggtcatattatgtctttttcctaaatacatgcagaggtaagagacctaaccctgggagtgtgtttggaggaatgaatgctttaaaatcaatcccagaatcggtaagtgtaatgcacaacagtaactgaatgacagacaaaaaccacatgatcatcttagtcaatgcacaaaaagcttttgaaaaagttcaacacgctttcatgattaaaaaaaaaatgcagcaaactagaaatagaagaaaactaccacaatatgatagccatatatgaaaaccccatagttaaatcatactcaatgatgcaagacaaactttttcctcgaagatcaggaacaagacaagaatgcccactttcaccacttccataccacgtagtcttggaatttctagatagagcaattaggcaaaaaggaagaaaaggaaagaaaagaaaaaagaaaaggaaaaggagggaatagaaagaaaagaagaaagaaagaaaatgcatccaaattggaaaggaagaaggaaaattattattcatagattatatgatcttagaaaaccctaaagattccacaaaaaaccctttggaactactaaacaaatttggcaaagcagcaggacacaaaagcaatacatgaaaatcagttgtgttactatatactaacaaagaacaatctgaaaatgaaattaagaaaataattctatttataatagcataaaaagaatacagctgggtgcggtgtctcacgcctgtaatcccagcattttgggaggctgaggcaggcagatcacatgaggttgggagttcgaggccagcctgaccaacatggagaaaccccttctctactaaaaatacagaattagctgggcatggtggtacatgcctgtaatcccagttactcgggaggctgaagcaggagaatcgcttgaaccccataggtggaggttgtggtaagctgagatcgtgccattgcactccagcctgggcaacaagagcgaaactccatctctaaaaaaaaaaaaaggaataaaatagtcattgaaagacttgtgcaatgaaaaccacaaaacattgctgaaagcaattttaaaagacataaataaatggaaagataccctatgtttatggattgaaagacttcatattgttaagatgtcaaaactatccaaagtgatctatagatttcacgtagtctttatcaaaaatcccaatgacattctttgcaaaaatagaaaaatccaccctgaaagtcatgtggagtattctttcaagaatttttttatgttggcattgagtattgaaatcagctctacaataattgtgacttttgaccttttgactttggttgtgtgctccaacccactctataccttgacttccccatttctcagattcatattttgcttcctctttcagccagttggtatatatctcttttttttttttgagacagaatcttgctctgtcgcccaggctggagtgcagtggtgccatctcggctgactgcaacctccgcctcccaggttcaagcaatcaagcaattctcctgcttcagcctctcaagtagctgggactacaggcatgtgcctccacacccggataattttttttttttttttgagacagagtcacccaggctggggcgcaatggcacaatctcggctcactgcaacctctgcctcccgggttcaagcgattctcctgcctcagcctcccgagtagctgggactgcaggcgcctgcatccacacctggctaatttttgtatttttagtagagacggggtttcatcatgttggccaggctgatttcaaattcctgacctcaagtgatctgcctgcctcgtcctcccaaagtgttgggattacaggcgtgagcctgtaaagcactttttgcaggcagatgttaaacaaataactatatgtatataactacaatatacaactatagtaatataattttaaaaaaatttttgagtcatggctcactgctgcctcaacctcctggggtcaagagttcctcccacctctcagccttccaatagtatatatatatttgctgggtgtggtagctcatccgtataatttcagtactttgggaggccgaggcaggaagactgcttatcctagctacttgggaggctgaggcagcgcaaggatcccttaagctcaggagttcaaggttgcggtgagctggaatcacaccactgcacagcggactgggtgacagagcaagaccctgtctccaaaacacacacacacacacaactattttaagccattgcacatcagcctgggcaacatagtgagatcctgtctctaaaaaataaaaaataaaaaaataaaaatagtatttcaagtttaatttttgaatgggtaatacaaataaaaaacaaaaataaaaataaattaaaaataaaaatatacagtatttcgagtttaatctttgaatgggtaatacttttgtttttttgagaaagagtcttgctctgtcgcccaggctggcgtgcagtggtgcaatctccgctcctgcaacctccgcctcctgggttcaagtaattctcatgcctcagtctcctgagtagctgggactgcaggcgcacaccaccatgcgcagctaattttttataatttttatagagacaaggttttgccacattggtcaggctggtctcctgagctcaggcaatccacccggcttggcctcccagagtgttgggattacaggcggagccactgcacccggaccaaatgggtaatccttttacatggttcaaaagccacatcaaaatatatgaagaattagccttcttcccagccttgtctcccatctttccaacaaccattaaccacaattcttagtttcttatgtttcacttcctttctttatgaataaacaagctagtattaatacagattcttgctttctcccgattttaactcttacagtagcatgatgtacagactgttctgcatgcttcttctcacgtaacagtatgtatcttgggaatctttccatatttttaccttaaaaatttccatgtttaaaaaaaaggtgcataatttttgtttgtttgtttgttttttggagacagagttactctgtctcccagctggagtgcagtggtgcgatctcagctgactgcaacctccacctcctgggttcaagcaattctcctgcctcagcctcctgagtagctgggattataggcgcacaccactacacctggctaatttttgtatttttagtaaagacggggtttcaccatattgccggggctggtctcaaactcctgacctcgagtgatccacctgcctcagccttgcatagtattttactacaagctagatatgatagacttttttttttagcccttgaatatctgagaatgttcttttgcccttacacatgaaatataaactgggtataaaatccttgagtcgcaatattttaccccataaaactcttgtagaggttggtattaaggccagcttacatatatttctttcttgtttttcccatcatttctacatggatcctatcttttttcctctcacagtttagatactttgctgaatggtctttatgtttgtttgcttgtttgtttgagacggagtcttgctctgtcacccaagctggaatgtagtgatgccatctcagcaacctccgcctcccaggttcaagcaattctactgcctcagcctcccgagtagctgagatcagaggcaagtgcacccacacccagctaatttttgtatttttagtagagatggggtttcaccatgttggccaggctggtctcagactcctgacctcaagtgatccacccgccttggtgaatcatgtttaaatgtagatcttctcactaatttcattcagcagacagtaaactctttgatctgcatatttctttatctcaggataattttattctcttatagtttcaattattaggcttaatcctttttgttctgatttcgcctgagaaacactgattatatgaatgctagcatatcagctagggatttcagggaacatgaattgtctgaaattcatgttttagaaaactcagacaccagtgacttaaaataggtgtttattttgctcacataatgaaatgtctagggataggcagttgagggtcgtggttcagtggaataaggatgttggagcccaaaccccccagtgccctcggctttttcatcatcgtcaaaatttggcctctctaacaccagcctcacctctaacaaaaccaaaataatgtcaagaaaagaaaagggagaaaggatatttccactgtgtctctgacccagctttgtgttctctgcctgctatgatcctcttcgtctgttactctgttcttttttgtcacattccaggcaagcttttttaaaggtcatcctccaaaatggattttaatgctattcttgaattttagttttcctgcaatcctttttgatatcatccaactttcctctaacttatcctgctgtcctttcatctcagtcatctctccatgtgtgacgttcggcttgcttttaaaaggactcagagtttttccttgtctaccaagtgtgttgtaatactttttggaatgcctgctcaatccgttatccttcccccttctctaagaataagctccctgggcttgggaaagattttattttatttttatttttatttatttattttttattttttttgagacagagtctcactctgtcacccaagctggagtgcaatggcatgatcttggctcactcctgagctgggattacaggtgcccaccaccacgcccagctaatttttgtatgtttttattatttttatttatttatttgttttataattttgtttttttttttgagactgagtcttgctctgttgcccaggctggagtgcagtggcacaatctcggctcactgccgagctgggattacaggcgcccaccaccacgcccagctaatttttgtattctcattttttattatttatatttatttttatttatttatttatttatttatttatttatttatttatttatgacagagtctcactctgtcgcccaggctggagtgcagtggtgcgatcttggttcactgcaacctccacctcccaggttcaagcgattctcctgcctcagcctcccaagtagctgggactacaggtgcccgccaccacgcccagctaatttttgtatttttagtagagacagggtttcaccatactggccaggctgttctcgaattcctgaccttgtgatctgcttgccttggcctcccaaagtgctggggttacagatatgagccaccccaccgggcttatttatttaatttaatttattttatttttttctgagatggagtcttgctctattgcccagactggagtccagtggcatgatcttggctcactgcaacctctgcctcctgggttcaagcaattctcctgcctcagcttcctaagtagctgggattacaggtgcacaccaacacacctggctaatttttgtatttttagtagagacggggtttcaccaggttggccagcctggtcttgaactcctcaagtgatccacccacttcggcctctcaaagtgctgagattacaggcatgagccattgcgcctggccactttcactgatttttgctgaactctggtatctaacatgaatgttggttgatattttcatgtatgttatcaaagaagacaaagtaaaacaagagctatatatttcagaacttcacttgttaatcagaggtaggagaacttctttgctgaaaaaaaaagattatgaacactggaagaacatttcctcaaatgtttgttcatgctattccaatgcaaaggctacagctacagatatgacatacttttatcaacattttcactagtattttttttttttgagacagggtttccagttgcacagactggagtgcagcagtgcgatctcggctaatcccagatgtttgcaaggctgaggcagaaggatcgcttgaacctgggaggcagagagtgcagtgagccgagattactctattgcactccagcctggttgacaagagtgaaactctgtctcaaaaaaaaaaaaaatcaatgaaaacattccgttagaatcaacttgctatatggaattagaaataaatgtatgttttaggctgggcaaggtggctcatgcctgtaatccacgcctgtgggtagatcacttgagcccaggagttccagaccagtgaaaccacatatctacaaaaagaaaaagaaaaaaaaaattagctgggtgtggtggtgcgtgcctggagtcccagctactaggaggctgaggtgggagaatcacttaagcccaggaggtcaagactgcaggccgggcgcggtggctcacgcctgtaatcccagcactttgggaggcccagcactttgggaggccaaggcaggcggatcacctgaagtcaggagtttgagaccagcctgaccaatatggagaaaccccatctctactaaaaacacaaaattagcctggcatggtgctgcatgcctgtaatcccagctactcaggaagctgaggcaggagaattgcttgaacctgggaggcggaggttgtggtgagccgcgatcgcgccattgctcttcagcttgggcaacaagagtaaaactccgtctcaaaaaaaaagactgcagtgaaccgagactgtaccactgcatttcagcctaggcaacagagtgagacattacgtcaaaaaaaaaaaaaaaaggaaaaggaaaaaaggagaaatacatatattttatcatctgtaaattgtataccatatatcccttatatcagaaaaatttataataaacgtgtatattaatatatatgcatttttttttctggaaagttggctgtaaaaacatctgttaaacatcactggatggctacctcacattcccaaataacatgcctctcatttccacgcagattaacgcattgcctttatttgtgtgtgtgtgtgtctgtgtgtgtgtgtgtgttttatttggttttgttttgagacagagcctccttctgtcacccagactgaaatgcagtggtgcaatctcagttcactgctgtcttggcctcctgggctcaagtgatcctcacacctcagcttcctgagtagctgggattttgagatggagtctcctcagtcccccaggccagagtgcagtgacatgatcttggctcactgcaacctctgcctcctgggttcaagtgattctcctgcctcagcctcccaagtagctgagattacaggtggccaccaccatgcccagctaatttttgtatttttagtagagatggggtttcaccatgttggccaggctggtctcgaactcctgacctcaacggatatctgtcagtctccaaaaaaaagtatatatatatatttcaggatctgatcccccttattatctgcatcttatcactgctatccccctactcaagacaccctcttctctcctctggattattgcagtcatctcctggtgggctctgctctgatacccttgccttcttacccaacagcctaagtggtcctttaaaaaagtcagatgacagccaggcatgggggctcgcacctgtaattccagtgcttttggacgttgaggcagaaagattgcttgagccaggagttcaaggctgcaatgagctgtgatcatgccactgcactccagcctgggcaacagagcaagaccctgtctctgctattgttgtgggaagtcagggaccctgaacagagggacctgctgaagctgtgacagaagaacataaattgtgaagatttcatggacatttgttagttctccaaattaatactttcataatttcttaggcctgtctttactgcaatctctgaacataaattgtgaagatttcatggacatttatcacttccccaatcaatactcttaaaatttcctatgcttgtctttactttaatctcctaatcccgtcatcttcgtaaactgaagatgtatgttgcctcaagaccctgtgatggttgcattaactgcacaaattattcgtaaagcatgtgtgtttaaacaatatgaaatttgggcaccttgaagaaagaacaggataacagcgatgttcagggaacaagggagataaccattagctctggctgcctgggagccgggcaggacacagccacatttctcttatttactataaaaaaagtcagttaagacattacaaagtccttcttctgtccaaaaccctctgttatgggctgaattgtgtccccctccaattcagttcatatgttgaagttctaagccccagtacctcaaaatgtaactgtatttggggatagagtcttcaaagaggcaattacgttaaaacgaggtcattagggtggggtctaatgtgtatgacttatgtgtttattagaagaggaaaatggaggccaggtgcagcggcttatgcctgtaatcccggcactttgggaggtcaaggtgggcagatcgctagagcccagcagttcgagaccagcttgggcaacacagcagaaccccgattccataaaaaaatataaaaattagccgggcgtggtggtgtgcacctgtagtcccaccagctatttgggaagctgaggtgggggaatcacttgagtcctggagatcgaggctgcagtgacaaaaaagaagaagccagatgcagtggctcacacctctaatctcagcactttgggaggctgaggcaggtggatcacttcaggtcaggagttcgagaccagcctggccaacatggtgaaaccgcgtgtctactaaaaatacaaaaattagctgggcttggtggtaggtgcctgtaatcccagctactcgagaggctgaggcaggagaattacttgaacccgggaggtggaggttgttgtaagccgagaccatgccactgcactccagccaaagtgagactccacctcaaaaaaaaaaaaaaaaaaaaaaagaggaaaattggacaccacacataaagggaagaccatgtgaagttatagaagaagactgccatctcaacaagccaaggaaagaggcctgaggagaaaccaaccctgctgacaccttggtcttggacttcaagcctccagaatggtgacaaaattagtttctgttgtttaagccatccagtctgggatactttgttatgacagccctagcaatctaatacattcaccaatggctcccaatttcacccagataaaaagccaaagttcttactcaaacttaccaaccctaaacttagcaaacttggtgtccactccttggaaacttgttcagccaactggaaggctggagaattccccctgttaggtggaaactggatcaatagagttagtgttgcaacaagaaacatccaacattggaaagaaaactaaccttaatgatttaataactaaagatctcatctcagaaagtttagccaactctgtctccttccctttgtgatgctctgcccctccatggagatcatgggaacaattcttaagctctttgtagactgggcaaggacacataaatcccctaagtcagaactgggtatcaatggtgggttaagggctgaaatatagaaacatgtgcaattatttgatggtttatggctcatttcaaccaaaagaccattcctagcccatttgcactgttttcattgagatgtcaaaagtgctgaaaggaggctgggaaaactggttggctcctgtctggggcaggcagctgatagaggaaattagctggttcctataattggcactgtagctcccaatgaagagagggcagacagatttaaatgagctgtttttgggaggaggtggggaaggaaaggagagatgatttgggtggagagcatacatgaagatgtaggggaggctggacgcagtggctcacaactgtaatgccagcactttgggaggccaaggcaggcagatcacctgaggtcaggagtttgagaccagcctggccaacatggtgaaacctcgtgtctactaaaaatacaaaaaaatcggaccagcctggccaacatggtgaaaccctgtctctgctaaaaattagctgggtatggtggttcacacctataatttcagctactcgggaagctgaggcaggataatcagttggatctgggaggtggaagttgtggtgagccgagatcacatcactgcactccagcctggatgatagagtgagactccatctcaaaaaaaaaaaaaaaaaaaaaagatgtagtggatgttgttggtgccatccagatcctgttcatctgctgtctcagtcagctcaagctaccaaaaagtaccactagctttggcttaaacaacagaaatgtgttttctcatagctctggtggctagaagtccaagatcaaggcacgtgcaggatgggtttcttctgagtctctctctttggcttgcagatggccatagtctctctgtgtcctcaaatggtctttcttctgtgcatatgtattcctggtgtctctctgtgtgtcctaattcctcttcttataaggatatcagtcagactggattaggggccaacctaacagcctcattttaagttaattacctctttaaaggcgctgtcggccgggcgcggtggctcatgcctgtaatcccagcactttgggaggccgaggtgggtgtatcacgaggtcaggagatcgagaccatcctggctaacatgatgaaaccccgtctctactaaaaatacaaaaaattagctgggcgtgatggcgagcatctgtagccccagctactccggaggctgaggcaggagaatggcctgaacccgggaagtggagcttgcggtgagccgacatcgcgccactgcactccagcctgggcgacagagagagactccgtctcaaaaacaaaacaaaacaaacaacaacaaaaaaaaggctctgtctccaaatagagtcacattctgaggtactggaggttagggtttccacatatgacattttggaggacacaattaagctcatacagctgcctggtgcatctttcccccagctgcagggagtgatggttgataatgactcacaactgccccattttctagagagttatttttggccaacaggggtcgccttgtctgggaggttactcacccccagcagcctgcaaacagtgctgtgtgactctgttgtataaaggctggtcctcttgccccagggtgagaccaacactgtggtgctattcatacttctgagctctctgtgggatcatgctaaggctagattctagatgaaaaccacatctttgctcagcttcttcctctgtcacatgtggcttccctcacttccttctcatgggagcactccccgaagacatcacgtgcagctgaatccccgcctcaggctctgcttctagggagcctgacttacaacattgttatctttttttttgacacagggtcttgctatgtcacccaggctagactgcagtggcattatcaatgaaaaaaatggaggaaatgtttatcaaattgtaaatgactctaagcttgaaggaacaatcagtatgtgagataataatggctaggcacggtggctcacacctgtaatcctagcactttgagaggccaaggcaggaggattgtttaagaccagcctgggcaacatagtgagacactgtctctaaaaaaaaaaaagagagagagatgataacaccaagtagggtttagggcaatctctgtgatccagaatgatggactgaacaagtaaaatcaaatttaacagggatatgtgaaaaagcctatattcagattcacttaattattttattttattttatttttttgaaatggagtcttgctcttattgcccaggctggagtgcaatggcgcaatcttggctcactgcaacctctgcctcccaggttcaagcagttctcctgcctcagcctcccgagtagctgggattacaggtgtgcatcaccatgcccagctaattttttgtatttttagtagagacagggtttcaccaggctggccagcctagtcttgaactcctgagtgatctgcccgcctcagcctcccaaagtgctgggattacaggcatgagccaccgcacccggccttttatttaaatcttttaagtcaacctgcctgactcttctattagaaagcatgcatggcccatcccttgagaaatgcccccactttccccctcccccctcctttttattttttgagacagagtctcactttgtcacccaggctggagcacagtggcctgatctcggctcactgcaacctccgcctcctgggtttaagcaattctcctgcctcagcctcctgagtagctgggactacaggcacctaccaccacattcaactaatttttgtatttttagtagacagggtttcgctctgttggccaggctggtctcgaactcctgatctcaagtgatctgtcccccttggcctcccaaagtgctgggattataggtatgagccactgtgcctggcgtcccctgttatttctgatccctcctttggataggtacaccctcctccaggtcctacatcctctctccagggctggactaggagggtcttcaggaagatgaggaaggagacgcagaggacctaggaaagaaaaatcccttcatgactgagtaggccccaccagcctactttgtccctctcctatttactgccctctttctcctcacagggagccggaccattcctcacccaagagtctacctgtggggaggtatgcaagacagtcctcttctgcagagaactgccagtttgggttttcctttaaactttaaaggaatttgactttcacccttccggcacctacagacccaccatggtcactcatggtcaactatcttttcttagagagaacatgtttaaaactaggtatgtgggtatattcatcaaagggaaaattagctgggcatggtgtcgcacacctgtagtcccagctactcaggaggctgaggctgaggtgggatgacaaggttgagcccaggagtttgagaccagcctgggcaacatagtgagacccagtctttatgaaaatgaaataaaataaattagctgggcatgatggtacatgcctgtagtggtagctactctggaagctgaggcggaaaggattgcttgagcccaggagttctgggtgacagagcaggaccttatctttaaaaataatagtaataagaatacaatttacaagaaggagaaaataaacctggagctcaagccctcatgaaacagtgtacttgaaaaaacaaaggctctattttagtaagtataggttaggtaatgctacaaaaacaaacaaatccaaaatctaagtggctcaaaactacatgttttatttttgttttctttcttttattttctatttatttttttttgagacaggttttgttctgttgcccagactggagtgcagtggtgtgatcatggctcactacagcttccacctcccagcctctgtcattcagataccccaaccccagttctcctttatggaagtaatcaggcttaccaatttcctgtgtctccttccaaaaaaaattctcaacaacaaatacacatttatatacatgagtctgttgtatatagcacatgttgtatatagtacctagaaaaatgcaaaaaaaacttgtatgtaaggtttaaaaaataactcattaatacccagttgaaggaatagaagtgagaagatccctccccaaagcccctgtctgtgcctccctgaacatagccagcttattcctaaacatgctcatgattctgactttagtgatagccatatccttgcctttattttatccttgcctttattttatttttgtttttgagagagtgtctcagtgttgcccaggctggagtgcagtggcttgatcatggctcactgcagcctcaacccccactcagggatcctcccactcagcctccagagtagctgggaccatagcaccacttccagctaattttttttttttttttttttttttttttttgagacagagtctcgctctgtcgcccaggctggatggagtacagtggtgcaacctcggctcgctgcaacctccgcctcctagtttcaagcagttctcctgcgtcagcctcctgagtagccaggcaaccactaccatgcctggctaatttttgtatttttagtaaagatggggtttcaccatgttggccagactggtctcaaactcctgacctgaggtaatccacccgccttggcctcccaaagtgctgggattacaggcatgagctactgctcccagccagctaatgtttttaatcttctgtagtgatgacttcttgctatattgttcaggctagtcttgaacttctggcctcaaacaatcctcccgccttggcctcccacaatgctgggattacaggcatgaaacactgcacccagccctgttaccttaccttttaaaaaagaatagttttagcacctgtgtacacatccccaaataatataggttcttctatttttgaaatgtatggactggaatcatatgttatacagtgtattgtcttttttttttttttttttttttgagatggagtcttgctctgtcacccaggctggagtgcagtggcacaatttcagctcactgcaacctccacctcccaggttcaagcaattcttctgcctcagcctcctgagtagctgggattacgggaatagaccacgacgcccagctagtttttgtattttcagtagaggcaggatttcacccggttagccaggctggtctcaaactcctgagctcaagtgatctgcctgcctcaacctcccaaagtgctgggatcacaggtgtgagccactgtgcctggcccactgtattgtcttttgtgtcttgtctttctcagttaacattttgtttctcagattcatccacatatagttagagttttgtcatttccattattgtgtagtatttcattatgaatataccgtaatttatcaattttccttttgggggacatttgagttttcaacttggggctattacatgcagtacttctatccatgggtcttggtgcacatgtgcatgagaaggattcctgggttatagagtgtgtcttcagttttactgataataccagatagttttccaaagccatattagtttatgttctcactagtagtataaaaatgttcgcattctctctacctttgtcaaatcttggcattgtcagagtatatgattattgattattgtaaacacatgggagtgtagtatacagtttattctccaaacttgccttttaaaaaacacaatacagcctggaatttatgctatcaaaaatatgaagacattcatttgtatgcttgtataacatattatgatatcaataccttactttttccctcctctttcttgaataatgcatcattttcaacatagacttgtagggcaaagatggcacattattcacagctcatttctctgcctgtggcagacattactaattgatcacaacactctttgccactgagtgcagatgtagcctcagatccctttcaatgcagtgctctagtaccttgctactcaaaatgtagtttccgaactggcagcatcagcattacctgggagtctgtgagaaatgcagaatctcagacccaccccaaactccctgagtcacatcctgcattctcaggtgattcaccacaaggaaggctgggaagtgctagcctaggctgcccttatcaatcaatcaaagccattctatgggatgaatgtgtgtgtcctccctatttcagaggcacactacatggctctgtccttgctcctgtccttttccaagcgcttatctatgcattgtatgagaacataggtcataggctgatctgatttgctgacagtaagaatctcaggggaaagctgaaacactggattggggaatcatgatacaaacccactgagaggatggagcaaaggaccaatttcaacaattggctaaataaagttcaaccaaaaaaaagacttcacaggagtatacttgaaaatagggcattagggggttcacagcatctgttccggaacaggtacctggtgttcttaagagggttctattacagattagtttgggaagcaccactgtgctttttcctcctcttagaaagtccatttataggccaggcgtggtggctcatgcctgtaatcccagcactttgagaggccgaggcgggcagatcacctgaggtcaggagttcaagaacagcctggccaacatggtgaaaccccatctctataaaaatacaaaaaaattagccaggcatgatggcgggtgcctgtaatcccagctactcaggaggctgtggtgagagaatcgcttgagcctaggaggcagaggttacagtgagccgagatcgcaccattgcaccccagcctaggcaacaaaagtgaaactccgtctcaaaaaaaagaaaaaaaaaaagccatttatgtggctgggtgtggaggctcacacctgtaatcccagcacactgggaggcagaggtgggagaattacttgagcccaggagttcaagaccagcctggacaacacagtgagactctgtctcaattaaaaaaaaaaaaaaaagtcaatttatgcactagaaaatacagagacctggatgcccatggtaaagaagtaaatttctctttgtttaaatcagtagtcctaggtcgagcacagtggctcacacctgtaatcccagcactttgaaaggccaaggcaggccaattgcttgagttcaggagtttaagaccagactaggcaacatggcgaaaccctgtctctactaaaaacaaaaatacaaaaaattagctgtgtgtggtggtgcatgcttgtagtcccagctactcaggaggctgaggtgagaggatcacttgagcccgggagttcaaggctgcagtgagccctgacagtgccactgcattccagcctgggaaacagagtgagaccctgtcataaataataaataaataaataaataatcagcagtccctaaacagaactgtatattacctattgatatctacagagctggtattctatggaatacaatgtgggaaacactggcttggggctttggtttatagactgagctatgaagaagacaatactagctttgaagcacataaagagaagtatagtctccagggacagagagaggagatgctctgctccctgcattctgagcaccatattgccttcataagttacgagggagggacattgagagactccagtgtcttcagagatggactccaggacagtgaagcctcaccacggctgtcctactgtgaatgtctaacttagagcagtttttcctatcctgtctcaacgcagtaactggggaggaggaagggaggctggtggatctgagtgcttaagaaggccccagaggaccaaaagtctccaggggaggactgcataatcctcctccatccccctcaacaggaatcactaagtagctgctatgaattttttttttttttttttttttttttttgagatggagtctcgctctgtcacccaggctggagtgcaatggcgtgatctcatctcactgcaacttctgcctcccagtttcaagcaattctcctgcctcagcctactgagtagctgggattacaggggtgcaccaccgcacctggctaacttttgtattttttggtggagatggggtttcaccatattggctgggctggtctcgaacttctgacctcaagtggtctgcccacctcggcctcccagagtgctgggattagaggtgtgagccaccatggccggcctgctatgaaatacttaatggcacatcctgtggaaaaggaactaagctttctttgagggggatcggagaacagacctgagacaggtggattaaagttacagaaaagtgaaaagtcatacaagctgcatatacatacagatgtacacatacatgtgtattctctgaccatgatgaaatagaatttataacaaaaatccaaaaaattatcccaaaatttgttaacttggaaaaatttctaaatgattcttggttccaaggggaaataaaaacacaaattacaacctagaaataaaacataattagagagctacatgtcaaaatctggaaaatgtggccaaagtggtacttaggaaaatgcatacccacaggctcacagataacgaaacaagaaagactggctgggagtggtggtgcgcatctgtaatcccagcactttgagaggctgaaagcaggtggatcacctgaggtcaggagttcgagaccagcctggccaatatggtgaaaccctgtctctactaaaaatacaaaaattagacaggtgtggtagcgcacacctgtagtcccagctactcgggaggctgaggcaggagaatcacttgaacccaggaggcggaggttgcagtgtgctgagattgcaccactacactccagcctgggcaacagaacaagactccatctcaaaaacaacaaaaacaaaaacattatcaggccgggtgcagtggctcacgcctgtaatcccagcactttgggaggccgaggcaggtggatcacctgagttcgagagttcaagaccagcctgaccaacatggagaaaccccatctctattaaaaacacaaaattagctgggtgtggtggggcgtgggtgtaatcccagctacttgggaggctaaggaaggagaatcgcttgaacccaggaggtggaggttgcggtgagccaagatcacgccattgcactccagcctgggcaacaagagcgaaactccgtctcaaaataaaaaaagactgacattaagtaaattaaattttctacctaggaggctgacaagtgaatagcaaaataagtccaaaggaagtataagcaaaaattactaaagatgaaaacaaaaataaatcaaatgaaaacaaaactcaataataaattttatcaaaccaaatgctaattcaatgaaggaaaaataataaaatggacatttttgaaaaaggtgatcaaagaaaaaaaagagttgaaaacaaagatagcatttgtagtaagaaagaaaaccaaagtacagatacttgtacagattaaaaaaataccaggggctaggcgtggtggctcatgcctgtaatcccagcactttgggagaccaaggtgggaagatcacttgagcttaggagtttgagaccagcctgggccaacaaagtgagatctcatctctattaaaaaaacaaaaaccaaaaagatatctttttttttccatgaatgaaatgcaaatatccaataagcacatgaaaagatgaaaaatataggaaggcaggtttagtctcattataaagactaacttcctcagccaggtgtggtggctctcacctgtgatcccagcactttgggaggccgaggtgggaaagatcacctgagctcgagtttgagaacagcctaggcaacatggcaagaccccatctctcaaaaaaaaaaagattaacttcccaatgcattgaaataacccatgagtatcatgaactctgtcacaaggaagggacaccagaggctcagatgttggctgagaggtgaccaattgtcaggagcaggggcactggtgatcttaggggatgggaacagagaaatctctgtttctgtgatttccatgatccatttccctgagctgcttgttttcaccaatggtccttgttgttatgggcagcaaagtccctctaatgatctctttgaggctagccagcaggggagaagtggctgtgagtggggcctattttcctggcttgcaggaagccagggggccagagcagaggccccctactgcccttcactcctcactaccaccagcttcccaggtgtcctggacgcatgtgggatgcctctgagataaccgggttaaggccagggcctgtctaacgcctgggctctggagcaggacccgggttctgtgggagctcatatgaaggacaggaagtgaccagtccacagactggaccaaaggtctgtgactcactggttgtatgtagtagggatcacgcccctgccatgccaaacaccaaaactgtaggtcagattggagttgtactggagtaataccatgacgaggagtgggctgcactggagacccccgtccctggaatgaccggggaagcaggggctgatgtgaggaagggtggagaggggctgcggtgatggcgaaggaggccacaagttcccggttttggcatgctgctcaggccttcgcctccccatgctggctgtattctacccgcacacccatattggcccagactgggaaacctcacagctttgctaagtcatggtcaggttagtcaaggccagtaaaccacgtgggtgatgcatcattgccaccctggcacgcctccttccagaccaggctgggactggctctccacatcccagggcctggccttgggcttctctgccagctggtcagggtgagtcactcttctttggaggatgctgccttcctctaatgttggacatgaagggcttttttgtcctcctagagttctggagcatcccagaaaaggcaaaactagggagcagaggaaagagaacattttttaaaaaacaaaaatgttgcctgggcgcggtggctcacgcctgtaatcccagcactttgggaggctgaggtgtgaggatcatctgaagtcaggagtttgagaccagcctggccaacatggtgaaaccccgtttctactaaaagtacaaaaaaattagctgggtgtggtggcgtatgcctgtagtcccagctacttgggaggctgaagcaggagaatagcttgaacccggggggcagaggttgcagtgagattgtgccactgcactccagcctgggcgatagagcgagagagactctgtctcaaaaaaaaaaaaaaaaaaatcaaaaccccaaacatacccaaggaccctcctcctggttattcacacctgtgattaacgaggtcacaccttgactgtcccttgggtcagacagaacttcgctgacccgggttcatgctcatcatccctcacaggcaggagggtgttcatcccctcactcacctgtttccagtctctggcccccacccctggggtcctcagctgccaatccacatacatccaagcccctgtttaagcttttaattgctcccactgacttcaaaatgaagcaatattccaccgtcttagcttgggtttacgtaaaagtagatttcaggtatggatagtttctttggaaaggactccaagtagtggagaagtgagaaacggcgcagggcggaaagccaaggaaaggtgcattgaagtgcagatgatcactgcgggcaccaggctcagtcctgcagggatcctctgcagagctgggtaaaagatgcttcagaattatccggtgaggggggaaaacaggtgggcagttactcactgattcctggcactcattggttgagggttgtcctcaggaaaataaagccccagtatgtccaggctactctacacaggctgagcaagtctcagtggtgctggagaaacccgtgtggtttctgcagtgggaacatgtcaggtgtcctggaactgcccaccacgctgcagatgaatatgccacaatgtcaacagtgtttaggctcatatatatatatatatatatatatatatatatatatatatatatatatattttaagacagtcttgctctgtcacccaggctggagtgcaatggtgccatcttggctcaccacaacctccacctcctgggttcaagcgattctcctgcctcagcctcccgagtagctgggactacaagtgcgtgccaccacacccggctaatttttgtatttttagtagaggcagggtttcactatgttggccaggctggtctcgaactcccgacctcatgatccacctacctcaacctcccaaagttctgggattaaggcatgagccaccacacccggcctccccacccagcccccctctgctttttttttttttttaagacagagtctcactctgttgcccaggctgaagtacagtggcacagtcatgactcactacaacctccgcctcctgtgctcaagtgatcctcccacctcagcctccagagtagctgggagtacaggcatgcaccaccagacctggctatttttaaaatttttttgtagagacaagagatggagtctcaccgttatccaggctggtctcaaattcctgggctcaagcaatctgcccaccttagcctcccaaagtgctgggattacaggtgtgagtcactgcgctcagcctcaggctcctctttcttgcttcaccatccattatcaaggtcgttctcttcaagtttgcaaggcacactgcagttccacatccaggtcccaggcaggtggaaaggtaaaagaatgtcttgcagctgatattgcagctgttcccgttttaaggcgttttctccaacaacttccacctgtgttccattggtcagaacctagccacatgaccatacctagttagaaggcatgctggaaaacgtagcttttctattaatggctgtgcgtattagtctgttctcacactgctatgaagaaatatccgagattaggtaatttataaagaaaagaagtttaattgactcacagttctgcattgccagggaggcctcaggaaacttacaatcatggtggaaggcaaaggagaagcaggcaccttcttcacagcgcaccaggacagagtgagtgcaagcaggggaaatgccagatgcttataaaaccatcagatctcatgagagtcactcactatcacaagaacagcttgggggaaaccaccccatgatccaattacctccacctagtacctcctttgatacatgggaattacagggattacaattcaaagtgagattcgggtggggacacagagccaaatcatatcaccatgttaggccaagattatccagcggttttattactcatccagctaaggttcagtggttctattactaaagaaaaaggggagaatggatgtagtactgggcatccagccatctgtaccaccctgcagtccctttgtgagaatatgagcatcccagtctcttcagcatcgctctcagtaccaaggatggtatgaaggggacaggaatcctcctaccctcaggaacagaggtggggccatggggagtggtctgcgccattctcaccattcacaagaggagttgcatagggggtagagggcagctggaattcctttggcctgctcctctaggcatatggaacattccctccacatatcctgctcttagtaggagaagctctctgctgcattttacaatcagtcattttcatgctgacgtacttattcctaggacattttcagtttagcccttttaagatgcttatctcaaattagaggcaccaacctcagtcaggtgatgacacctgtgttcctcttccttctggaagccttgagctgagtcctccttcgggactcctcccactgatgcctcccatcatgtacccacgggatgctggtagatgtttgtggtcagctttcttttgttcccgtgaggtggattcgagactctgagaaagaaacaccccttctcaattccaccacaagttctgcctcttcaaccctcaaaaaatcctaattgtcaagaaatcacatcttatgcattttggtgctccacaacacttcctgaaggcctgtgtgaggcaggagctcaagatctacttgttcactgcatggttgtttgtgatctgtcactcagtgagtgaccaagggaaactacctctgaagagagcagacaccgacatttccttccctccccgtagatgaatgctgcaatgcatttcaaggggtagagtctaagtccctttcctttcctttcctctcccctttcctttctttcctctccccttcccttcccttccctttccttttcctttcctttttcctttgtgagacagtctccctctgttacctaggctggagtgcagtggcaccatctcggctcactgcaacctccgcctccagggttcaagtgattcttgtgcctcagccacccaggtggctgggattacatgcatgcaccaccacatctggctaatgtttgtatttttaggagagacggggtttcaccatgttggccagactggtcttgaactcctggcctcaagtgatctgcctgcctcgacctcccaaagtgctgggattacaggtgtgagccactgcgcccagcaaattcccttttctttgaattggggctgaccttagtgacttaagagtggaagggacatcttgtgtcttcccgggcatggagttaagaagccttacgggtctcatctagctctcttggaactttgctctcgagacactccttctcagaccccagcccccatgctaagtggactcctgagccacctggaaaggccgtgcatcaactctccagttgattgtcccagctgagttctcagcagacaattagcatcacctaccggccacataaatgagccatcttgtatttgcatccagttgagtcttgcgctaactgtagcactaaccaatatctaacaacaatcacctaagagatcccacatgaaaactgctgagctgagcccagtgaactcgcagaaccataagacacaaaaatcaattgtccagtgatgaagtgttggggccatttgtaatgcagaaatagataaccggaagagtgactaagccaggaagagaacctggaagaagttgtcttgatcaccgaggagtcttactggtgagaaagcactgcccagctgacctactctgccatattcctgatccagatgcgcaaagggctgtggtaggtgacaggtggcctcctttcaccacaatggttccactaattcaagtgtaagtgaaagcagtatttaattattgagagggtgaagacctaacaaatatttgcataaaagaatttttgtttaccctttgcaaataacctggcagattttgcttgttggttggttctttattttgcttttgagacaagatctcactgttgctcaggctggagtacagcggtgcgattaaggctcactatagccttgacctgttgcactcaagcgatcctctcacctcagcctcccaaatagcacagcaccactcctgattaactttttttttggttgctctgaaacaaatgtggcacaataaaagaaattggcttcccagaagatgtatagaatcttctgtttacttgttcatttttccttattttctaggagtgaacaatgccccatttccaggtgaatggcaatggagtagttgtccgagggtactcaatactcaagagtcagctgatcatgtccttagatgcaccagaaatgatggtaaagcttgggagtgcggatacctttgattctaattattagcgaatgcctcagctcagcatcactgggctatatggggcctaaagcagggcagagccaatcaagaacactcaaagacagacagatgcagaactgggaatggacgtgtagggacgggaagctggagaaagatgggagcatgaatatgcatgtaagggtacatagatttggccgggcatggtggctcacacctgtaatcccagcactttgggaggccgaggcaggcagatcacctcaggtcaggaattcgagaccagcctggccaacaaggagacaccccgtctctactaaaaatacaaaattagtcaggcatggtggcgatgcctgtaatcccagctacttgggaggccaaggcaggagaatcgcttgaacccggacggcggaggttgcagtgagccaagatcgcgccattgcactccagcctgggtaacaagagcgaaactccgtctcaaaaaaaaaaaaaaacaaaaagggtacatagatttatagttatagtgatacgtatatagcaaggtgaatacagacattaatatgtgcatttagagaaagatatacaggacgtagaaaaatgtcttcttttattttttgagacagtctcactctgtcacccaggctggagtgtagtggtgtgatctcagctcactgcaacttctgcctcctgggttcaagtgattctcatgcctcagcctccaagtagctgcgattacaggtgtgtgccaccacgctgccaccacacccagctaatttttgtatttttagtagagatggggtttcaccatgttggtcaagctggtcttgaatgcctggcctcaagtgatccacctgcctcagcctcccaaagtgctgagattacaggtgtgagccactgcgcccagccttttttgagtttttgttgaagatagggtctcactctgtcgcccaggctggagtgcagtggcaccatcatggctcactgcaaccttgacctcctaggttcaggtgatcctcccacctcagccggctgagtagccaggactataggcatgcaccaccatgcctggctgatttttgtatttttttgtagaaatggggcctcactgtgtggtccaggctagtgttgaactcctggcctcaagcgatcttcccacctcagcctccacagtagctgggattacaaacaagcatgagcctccatactcagcccctttcgaatcaagtagttcttggcgagtttgcaggaccatagttccctgtccatggtgatggttccagggaaggatagccacccatgttggccaagaagaactctccccggcatctttctacctggagctggtaggaaagagtgtttttttcctttttggccgtgagactataagaacatgaacttgaagtttcctgaagatctagttccagccgggcatggtggctcacgcctgtaatcccagcactttgggaggctgaggtgggcggatcacctgaggtcgggagttcgagaccagcctgaccaatatggtgaaaccctgtctctactaaaaatacaaaaattagacttgcgtgatggccggcacatgtagtcccagctacacgggaggctgaggcaagagaattgcttgaacctgggaggcggaggttgcagtgagccgagatcacgccattgcactccagcctggaagacagagcgagactccacctcaaaaaaaaaaaaaaaaaaaaaaaaaaagatcagttccaacttctctgtggagactgatgacttgagaaacaggagccaaacagcacagtaacttagtctggattccccagaaatagactctgaagtgaggattcatgtacaagagattatgaaggaggtgcttccaggggaaacagtaagggaatgaaggaggcaggtcagggaaaaggagaaaactgagctagggtggcatttcatgtgaggttccagtctcagtcttgtcccttgggaagctgtggggtgtcaattatgcctcagggttatccttcttcaaagcaagagatctggactttcttcctcccacactatcaccctggtaaatataaaatcccagcgcttacacaacagctccaaaaactccagaaagactctcctgaacgtcacaggtgtgggaaagaaccaggaaggttctgaaggtggggcacacaaagacaatgagagagaatgtggacacagggagccctagttgaagcagcctggaggttctgcatttttcctgccctggggcttggctttggtggctcacactgagggaacttcactgtgtatcctggcttggtgccactggctgggactccagggtgtggtcagagctgctggagggcaggaccagagccagggcctggctgaggcctggcaccagggactgtacaggcgaggctgcctgggccctggatgaagagcagtgatgtgaggtgccagctcagacgccagagataggaaagcccaaaggctagcctaaggcttgggtagtgggagttgatgcaacaaagtgggggagactgaacaacggcttcctctctcttcctttcactcttagactgtcctccttgaagggaatcagattatgccaccccaaaatatgccacattggcacaagaattattttgagctgaagccaattaagaaatagcagacaccggaagaactctctgcctgtgttactgtgtttgcaggaatacctgaagctgggaatttataaagaatagaggtgtatttggctcacagttctgcaagctctacaggaagcatggcatcagccagggctcagcttctggtgaggactcagggagctgccactcatggtggaaggtgaagcaggagcaggcatgtcacatggtgggaacaagcaaggcgggggaggggccacacttttgcacaaccagatcttgcctgaactcagagcaagagctcactcattaccatgagatggcaccaagccatttatgggggatctgcccccatgacccgaacacctcccaccaggcccctcctccaacactggggatcacacttcaacatgagatttgaagggggcacacatccaaaccatatcactgcccctcccatttctgcctaaaagcagaacataaatttccatttgtaagggtgtctttctctccctaccaggaagagtagaataacgcttaatcaccattatcactggagatggtaccaagatgaatctgcgtaaatgaaccttactagataccccttatctaacctatctatagtttcccccttatatttactttcccacagtttacaacccctagaagcccaaacccatttttctttgtctagttacctctccacaatttgtcaccctttgttaaaatgatataaactctcaggcctaaccactgctttaggtttcacttcttttctgtgaagtccctgtgtaaacacaaaataaaactttcctcctgtcaatctgtcttttgacagtttaactctcaggcccagctatagaatttaagagtagaggagaccgggcatggtggtacatgcttgtaatccctgcactttgggaggccaaggcaggcgaatcacttgagctaaggagtttgagaccagcctgggcaacatagtgagatcctgtctctatagaaaaataaaaataatgaaaacattttattgccttttaaaaaaaattttatttttattactttttaaaataaagacaggccttgctatgctgcccaggtttgttttgaactcctggcctcaagcgattcttccgccttggcctcccaaagtgctgggattataggcataaaccaccacacctagccataaatttaatgttatatgtttttttaccacaataaaaaaggcatacagaatgtaggtatatacatttatctaagtgcatcaacctgtatagttaaagtggtacttttttttttttttttgagacaaaatttcactcttgttgcccaggctggagtgcaatggcacgatctcggctcactgcaacctctacctcccgggttcaagtgattctcctgcctcagcctcctgagtagctgggattataggcatacgccaccaggcctggctaattttgtatttttagtagagatggcgtttctctatgttgatcaggctggtctcgaactcctgaccttaggtgatccacccgtctcggcctcccaaagtgctgggattacaggcgtaagccaccgcgcccggcctaaaatggtacattttatggaacacagatagtactccagtaaagctgatttaaaagaataaaataaaactaaaaagaggccaggcgcggtggctcatgcctataatcccagcactttgggaggctgagggtggatggatcacctgaagtcaggagtttgagaccagcctggccaacatggttaaaccccatctctactaaaaatacaaaaattagccgggcttggtggcacacgcctataatcccagctactcgggaggatgaagcaggagaatctcttgaacccgtgaggcagaagttgcagtgagctgagatcgcaccacttcactccagcctgggcgaaagagagaaacttcgcctcaaaaataataatcataataaataaataaaaataatctttttcctataggggcccaacctcatgacatcctatgaaatcatgttttgcaattgctgtcaaggtttctaacaatgagaccaggtttagtggcttacacttggaggccgaggcaggcagatcacttgagtccaggagtttgagaccagcctgggccacatagcaaaacactgtctctacaaaaatatatatacaaaaattagctgggcgtggtggtgcgcacctgtggtactagctacttgtggggctgaggtgggagggtcgcttgagcttgggaggtggaggttgcagtgaattgagatagtgtcactgcactccaacctgggcaacagagcaagaccctgtctaaaaaaaaaaaaaattgcagcaatagctcaagcacccaagtccttcactggacaggaagtgtcctaagggtactttctatggtctggttgttattgtgccccagaggatgatgtgatgcagtgacttgagaggcaagcattaaatgttgttggctgggcatggtagctcacgcctgtaatccagcactttgggaggccaaggcaggcggatcatctgaggtcaggagttcgagaccatcctggccaacatggcgaaaccccgtctctactaaaaatacaaaaaattacccaggcatggtggcgggcgcctgtaatcccagctactcgggaggctgaggcaggagaatcacttgcacccatgaggtggaggttgcagtgagctgagagcgcgccactgcactccagcctggctgaaagtgagactctatctcaaaaaaataaataaaatgaaataaataaatatcgttgaatggatggactcaccaatttgtatttgtctgttatgtaacaggcatctatgtatattctctgtgtatactttgcctgtttatattcttggattgatattctttttttttttttttttttgagacagagtcttgctttgttgcccaggctggagtgcagtggtacagtcttggctcactgcaacctctgcctcctgggttcaagcgattctcctgcctcagcctccagagtagctgggattacaggcaagcgccactacacctggctaatttttgtatttttagtacagacggggtttcgccatgttggccaggctagactcgaactcctgacctcaggtgatccacccaccttggcctctcaaagtgctgggattacaggtgtgagccaccatgcccagtcaattgatattctttaaattcattcatacattctttcaacaaatattggcagagtgcagtggctcacacctgtaatcccagcactttgagaggccaaggcaggaggattgcttgagcccaggagttcgagatcagcctgggcaacatagtgagaccccatctctacaaaaaacaaacaaaattagctgaacatggtggcatgtgcctgtagtcccagctactcgggaaactgaggtgggagggtcatttgagctcaggaaagtagaggctgcagtgagctgagattgtgccactgcactccagcctaggcaacagagcaagaccctgtctcaaaaacaaaacaaaacaaaacaaaaaccaaacatttactgagtcccagctatctgacaggctatcctaaatgttgaggttacacagtgaccaaaatagacaaaaatctggtccttggcctggtgtggtggctgacgcctgtaatcccaacattttgggaggtgggtggatcacctgaggtcaggagttccagaccagcctggtcaacatggcaaaatcccgtctctactaaaaatacaaaaattaactgggcatggtggcgcacacctgtaatcccagcactttggggggctgaggtgggtggatcacttgaggtcaggagttcaagaccagcttgaccaatatggtgaaactccatctctactgaaaatacaaaaattagcagggtgtggtggcaggcgcctgtagtcccagctacttgggtagttgaggcaggagaatcacttgaacctgggaggcagaggttgcagtgagctgagattgcaacagcgcactccaacctgggcaagagagcaagactcaactaaaaaaaaaaaaatctgtgcccttgtggattccatcttactaggggaaatacttgtaagtaagataaatttgtgaaatatatactatgatggtagtgagtattaaggagaaaaatgaatcaggatcagagataagtagcatggggcctgggggcttagcttcactgaggtgatatttgtatcaacacttcatgaatgacacacagacatcaacctcactgccccatggaagtataatctgaggcagagcagtagaaactggctcaggagaaaagggaggatgcagacatgtcaattagacacagccaaagatgcttcatgatttcctgggtgtgtgacctgtgtagacgcccagggacccatgcttagagggactctgtgcttgatttaatgctctgctgtcaccctcttgaagtttttaatcagtttttaaacaagggactgcgcattttcatttggcactgggccccacaagttacaagttatgtagccggtccttcactctgttgaataaacaatggcttctccctatcaccctctttggaagcacagatactcccagcaaatgctaatcattcatgtttctaatttcctggggtgacttgtttttcctctaacaggtgtgaagtatgagatagagactgtatcatccagggtaggctgggatatgctgcatgacagaaacccccaaatctagtggcttaacacaacaaaggtgtacttcactctcgcactttgtgttcattatgggtcaacgcggggctctgttgtgcatcacgatcactctaggaccgtggcagagggaaagtgaaactggcggttagagccgctactcagaaatgacacatattgcttgaactcacatttcctcgccaaggcaagtcatgtggcgacgccctcctttaagagatgaggaagttcaatccaaacatgagcccacagaactgggccacttgtcttttggtgtgtttttttgagacacagactcttgctctgttgcccaggctggactgcagtggtgtgatcatggttccctgcagcctcaacctcctggcctcgagcaatcctcctgcctcagccttccaagtagctgggactacaagcatgcaccaatgggcccagcctacatttgttaattagttattccaacactatttattaaacaagctatcctttctctggtgattttaattgcccatttatcacatacaaaattttgctgatatttgtgactctttttgcatagtgtttctgttccattgatttttctttcaatgcctatgcagaatcaccctgttttaatttctgtaggtttataatgccattttattttattgttttagagacagggtcttgccatgttgcccaggctggccttgatctcctgggttcaaggaatcctcctgcctcagccttctgagtagcgggactacaggcacaagacagcatgcctgatttgtaatgtcatttaatatcaaagaggttaagtattctcaagtttcccctttgacttttccttggctattatattaatcttttatttctagatagatttcagaaccactttgttgaattcccccactccttctatgtgattttgattagaatggaattgcatttgtagatgaatttgcatttctttataatattgagactttaggtttttgttttgtttttagagacagcttgctctgtcaccgaggctggagtgcaatggcacaatcatagatcactacagcctccaactcctgagctcaagtcatcttcccacctcagctgggactacaggtgcatgccactgcacccagcttttactagtgtaatgaaataatctttccatctcctgggagaatggtcactcacgactgaaattcactgaaatttttaaaaaagaagaaaaaaaaattggaaagccttattttctctctctcctttcttttttgagacagggtcttgctctgttgtccaggctggagtgcagaggtgcgatcctggctcactgcaacctctgcctcccaggctgaggtgatcctcctgcctcagcttcccgagtagctgggactacaggtatgcacccccatacctggctaacttttgtatttttagtttaaaaaactgcatagtttttgtttgtttgaaaaaaatcattacatcttactgagatacttaagaagattattttataaaactaataaaagctgggttactatcttcagtaactttctattaatttgatcttcaagtattttgttttatagttattgtgaatgagacaatgttcctaaatgttattctagtagagtagaagttctctcaattttgatattatttgtaatcatctatcctgctgctaagctctcttattagtgcaaacagctttttgaaaaaatctctgtgtccttaatgtagacgccggaaaataaagaagaaaaatcctcttggtttttgtaagttgcaattaatgtgttcacaaattatgattagttgctcatctttgtttctttcctttttctttttgtaccagtttcatacttctcatttctacagcaagactgaaagttgctgtgttaactgatacaatttaatttctactgtcttctgtgaccccatgactgcttctctccagcctggcagcagctagcgtgttcagtgcctactggcttagggaaggaatgacacagcagaatgtagaaaaaggaagtcaagttcttgaaatttttagtttctaaagtctttctgtctttttttttttttgaaatggagtctcagtctattgcccaagctggagtgcagtggcgcaatctcggctcaccacaacctctgcctcccggattcaagtgattctcccgcctcagcctccttaatagctgggtctacaggcatgcgccaccacgccaggctaattttcaccatgttgcccaggctggtctcgaactcctggcctcaggcgatccactcaccttggcctcccaaagctgggattgtaggcatgagccactgcacccagccatctttctcagacttgaaatagcagatgaggcgagtgacactctataccaggttacacactgtggcccctggacccctgctgatccatgaactgtctgttactgtccatgatgagttaagtacagatattgagaacaaacatttagcagctgttacagcaatatgatgttgtcacaatatccaagtgcatgattggcagactcatttcattcaacagtgtacaggccaaaaagattaattcatgacaattggaaataaaacaaaactggtcttccatcatagattgtttgataagtgcttctttaactagaagtctctagatgcagagaaagaggagaattagagagaagcatgtgggtttgaatctgagatgtgtccctgcatcttatcccctcccctagaagcccaaaaaactgctgtaagtgggcggtgggggatggaaggggcgagctgccagcaggagaacaagagatatccttgacaagccagaaagctggaatcggaagggacccatgccctttttctaagtagagtctgggaagtggcaagacagtgaaaaggctatgggcacagcaggggagctgggtctggcagcccacatggttctcacgcaccccggcggagcagcagaacaatttgatgtgtgtccagaaggagcccaaaggtagcaaagaaccttgaacactcccacgaagtaggcacacacgccacctaaagctcccacatgcccaaatggggtgcagaaggagctaagagacacagatcagaagaatgttcatagctgagaacagggaacaaaaccacagctacctgtatcaccagtacccaaagcctagacaaaacaaaatacatcttagccagtgtggacactcaagagtcagatgatcctcctttctggaggccttgacactaaatgacagccctccctgcttgctgtcagaaaggggaacactctcattatgacgaggagtaaatttccatcacctgggagaatggtcactcatgtttgaaattcactgattttcttttttttctttttttttttttttttttagacagagtcttgctgtgtcacccaggctggagtgcagtggtgcaatctcggctcactacaacctctgcctctcgggttcaagcaattctcctgcctcagcctcccgggtagctgggattacaggcacccaccaccacgcctggctaatttttatgtctttttttttcttttttagcagagatgtggtttcgccatgttggccaggctggtctcaaatagctgacctcaggtggtccacctgcctcggcctcccaaagtgctgggagccaccacgcccagccattcactgaaattttttaaaaagaagaagaaaatgggaaagccttgtttctctctctctttctctctctctctctctctttttcgagacagggtcttgctctgttgcccaggctggagtgcagaggcataatcccggctcactgcaacctctgcctcccaggctcaggtgatcctcctgcctcagcctcccaagtagctggaactgcaggtgcatgccaccatgcctggctaatttttgtatttttagttttttaaaaaataactacatagtttttgtttgttttgagacagagtcttgctctgttgcccaggctggaatgcagtggcacgatctaggctcactgcaacctcaacctcctgggctcaagcaatcctccctatctcagcctcctgagtagctgggattacaggtgcccaccaccacacccagctaatttttgtaccattagtagagacagggtttcaccatgttggccaggatggtctcaaactcctgactctcaagtgatccgctcaccttggcctcccaaaatgctgggattacagacttgagccaccatgcccagccttaaggaaacccttatttcttgcaaggctatctgtatattgacattcatacctcctttggctttgttcaatcaaaatgatagacgttagtgggcatttttaccttgtttctgattttaatgggaaggtatttggtattttattattagttatggcatttgtgattaattcttcatattgttttttttttttttttctttttcagatggagtttcactcttgtcgcccaggctgtagtgcaatggcgcgatctcggctcattgcaacctccacctcccgggttcaagcgattctcctgcctcagcctcaagagtagctgggattacaggcgtgcaccaccacaactggctaatttttgtatttttagtagagatggggtttcaccacattggccatgctggtctcgaactcctgacctcatatgagccgcctgcctcagcttcccaaagtgctgggattacaggcgtgagccaccgcacccggcctaattcttcatatacttgatgatgttagggcccatctttttgaagttggttagggagatttttttttttttttttttttttttaggagcagaggtttaatagaagaaagagaaagaaaaacagttctctctctctattgagagagtggggacctctgagaggaaagacccagctagggagttttaatatgcctttttattaaatcaggaatagctgtcgaattttgtctgatggttttttggcttctatcaagaagagagtcatatgatttttctccttcaacctattagggcactcaagtacacacagatttccttaatatacctttgactttgcccatttgttttaacccacagcttggttttatcttattataatttatttacaatcttaaaatcaatatttataaatgaagttggcatgtacatttcttaacacattcgtttggatgggctttgatataagcattctactaggcttgttaaatggacagtgttgcttctaaacttttctcttgctttagattctagaatgccaaattacctacagtctttcttcaatgtttagtagaaaatttccataatattgttcaactaggtctgaaaatttggaggcataagatctttttctctctcttttattttaggttcagggaatacatgtgcaagtttgttacgtgggtaaattatgtatcgtgggggtttggtatactgactatttcgtcacccaggtaatgagcatagtacctgaaaggtagttttttgatcctcaccctcctcccactctccaccatcaagtaggcctcggtgtcaactgttcccttctttgtacccacgtgtgctgaaggtttagctcctgcttgtaataagtgagaatgtgtggtatttggttttctgttcctgcgttaattcatttaggataatggccttcgggtccatctgtgttgttgcaaagaacacgatcttattctttttatggctgcataatattctattttaatttttttttttttttgagacggagtcttgctctctcacccaggctggagtgtagtggcacaatctcggctcactgcaacctccacctcttgggttcaagagattctcctgcctcagccccctgagtaactgggactacaggcgtacgccaccacgcctggctaatttttgtatttttagtagagacggggtttcaccatattggtcaggctggtcttgaactcctgacctcgtgatccacccacctcagcctcccaaagttctgggattacaggcatgagccactgcgcccgtcttctattttaatttttattattattgttttttgagatggagtcttgctctgttgcccaggctggagtgcagtggcgcaatctctgctcactgcaacctccgcttcctgggttcaagcgattctctccctcagcctcctgagtagctggaactacaggcgtgtgccaccacagccagctaatttttgtatttttagtagagatggggtttcaccatgttggccaggccagtctcaaactcctgacctcaggtaatctgcctgcctcggcctcccaaagtgttgggattacaggcgtgagccactgcgtctggccccataatattccacgttgtatatgtaccacgttttctttatccaggccactgttgatgcaacataacatctctggtgactcttttcccatcctccagagttagctggtttattccaattttctatttcttcctgagtcaattttagtaatttatattttatttttaaaatagtccatttcatttatttttaaaaagtccacttcatttccattttttaactcacacacaaggttgtacctaatatcctgttacctgaaagtttatccctgaatccagaatttcatctgaaggctgtattcttggactccagattgccacctacaacatcctctctgatctcaccgtaggtacaaaccttctttttgtacaagtttctcctgttgcaggtagcaactctcctccaattctcctgttccattttttttttcatgctcctgaatctttttttgtttttctttttttctttttttttgagacagagtctcactctgtcacccaggctggagtgcagtggcacaatctcagctcactgcaacctctgcctcctggattcaaataattctcatgcctcagccttctgagtagctggaattacaggcatgcgccaccatgccctgctaatttttgtatgtttagtagagacagggtttcaccatggtggccaggctggtctcaaacttctcacctcaagtgacctgctcgcctcggcctcccaaagtgctgagattacagtgagccactgcgcctggcttcctgaatcttttcatgagccaagttcctctttacatctttacccaaaggagcctgtttttctctggtgtcaggagttgtgatatgggtttcctgttctaatcttgtagtcccagacaaaaaaaagccatactttatttgggcttatttaccagatttagatgatgagctgagagtgaagagaagggctggacccccagctagggtaggggacgggaggccaggctcttttccatgacataaaggactctccaatatctcacctgcctgcatcctctcccaaggcccctcgtgttacaacctcttagccataagaaagcaggtggttgtcaggccatacctgccgtgtcacctctcacaggtgctcctctcacaggctgctccatcagtccagatgcccacgtcatgcttcttgacttgggtagtacatccttgaacttccacttttataatttaagctatacatttaggttcatgtgcttttccatgtatgtattatagttcacaatgaaaagggttttaatatgcagctgggtgcggtggctcgtgcctgtaatcccagcactttgggaggccaaggtgggaggatcacttgagcaggagtttgagaccagcctgggcaacatagtgagacctcatttctattaaaaaaaaaaaaaaaaaaaagtattggccagccacggtggctcacgcctgtaatcccagcactttgggaggctgaggcgggtggatcacttgaggtcaggagttcaaaaccagcctggccaacatggtgaagccccatctctactaaaaatacaaaaaattagccaggcgtggtggcgtgcgcctgtagtcccagctgcttgggaggctaaggctggaggatggcatgaacccgggaggcgcagcttgcagtaagacgagatcacgccactgcactccagcctgggcaacagagccagactctgtctcaaaaaaaaaaaaaaaaaaaagaagaaaaagaaaaaaaagtatctgtatatatttttatatatgcttttttttctggaagaatacaatgacagattgttaatatggagtctttaatattttgcttactataattccatatttaaataaacaattatttatctttttatctttttttttttgaggtagggtcttgctctgttgctcagagtggagtacagtggcacaatcacaactcactgtagcctcaaccttctagcctcaagcaatcctcccacctcagcctcccaagtagctgggactacagatgcacactgccacgcctggctaatttcttatttgtttagttatttttttgacacagagtcccactctgtcccccaggctgagtgcagtggtgtgaccatggctcattggagcctcgacctcccaggctcaagcaatcatcccgcctcagccttccaagtcgctgggacttcaggcatgcaccaccatgctcagctaatttttgatttttttgtagagatgaggtcttgctattttgcccaggctggtctcgaactcacagatgcaagcaatcctcctgcctcagcctcacaaagtgctgggattataggcatgagccgccatggccggccaacaattatttttcaaagtctggaagatgacaggaaaacccaagactgaccctagaagacagagacaccatcacggcctcagctgtgtccagatttcaacatgtagctgtttccctcctagacaacaaccttcctttccagccttcactccaaagtatcaattactcacagggttttaaactttgggacctgatcattgctaggtctttgccaggctttgtacactccaggtgctttccagatttagatgatgagctgagagtgaagagaagggctggtcccccagctaaggtaggggatgggagtaaggaaggagtaagaggacatatttttttttttgagacagagtctcattctgtctcacaggctggaatgcagtggtacaatctacaacctctacctcctctcccctggcctgggtagagcctggcttcctgtcccctaccctagctgggggtccagcccttctcttcactctcagcttatcacctaaatctggtaaataggccaaagaaagtatggcttttttttttttttttttttttcctgggactagaagattagaataggaaatccatatcacaactcctgacaccagagaaaaacaagctcctttgggtaaagatgagaagaggcattcggtggagtagctgggattacaggcgtgtaccaccacgcctggctaatttttatatttgtagtagagatggggtttcaacatgttggccaggtgagtctcaaactcctggcctcaagtgatctgcccgcggtggcctcccaaagtgctgggattacgggcatgagccaccacacccagccaggatatacctaaaaaaaaaaaaaaaagtttcaaggccaagcatggtggctcacgcctgtaatcccagcactttgggaggccaaggtgggcggattgcctgaggtcaggagtttgaaaccagcctggccaacatggtgaaaccccatctctactaaaaatacaaaaactagcctggcgtggtggcgcatgcctgtaatcccagctactctggaggctgacacaggagaattgcttgaacccgggaggcagagcttgcagtgagccgaggtcgtgccactgtactccagcctgggcaacggagggagactctgtctcaaaaaaaaaaaaaaaaaaaaggtttcaaacacaattaattcaaaccaacctcccttaaaagggaaaaaaagccagcattttccacgggagacagagatttgaaaaatgaagctgtgttcgtgtctcctaactcagctaggtcagcagaagggtgggcaatggggaagcaatcaggtggtttttttaatcctcctgcctcagcctcccaaagtgctgggattataggcatgagcctactgcactcacctggctagagtgcggtagcatgatcacagctgactgcagtctccacctcctgggctcaaggatcctcccatcttagctccctgagtatctgggaccactggcacatgccaccatgcctggcttaattaaaaaaaatttttttgtagatggggtctcactatgttacccaggctggtttcaaactcctgagctcaagagatcctcccacctcagcctcccaaagtgctgatattacaggcgtgagccaccatgcccaacccagaaccaggtttaataactgtagaggaggcaacggtgataggcagtctaagcagcaggtggaatgatactgttaaatgacatcaagttcatctgagtgtgggtgggaacttagtataatagattttaaagggatcactctgactgctgtgctgataagtgactattttatgttgataatatactgagataaaaatgttatggtcacgaaataaaaactgattgctgtaaaatgtgaaaaagggtccttggacattaaaaccatgatagcaagtaacagagctgggtgtggtggctcacgcctgcaatcccagcactttgcagggccgaagcaggcagatcacgaggtcagaagatcaagaccatcctggctaacacggtgaaaccctgtctctactaaaaatacaaaaaaattagccgggcgtggtggcacgcacctatagtcccagctattagggagactgaggcaggagaatcgcttgaacctgggaggcgggggttgcagtgagccaagatcaccccactgcattccagcttgggcaacagagcgagaatctgttccaaaaaaaaaaagaaaagaaaaaaatagtaacagaagagtagaaggctgggtatagtggctcatgcctgtaatcccagcactttgggaggccgtggtgggaagatcactttgaggccagtagtttgagaccagcctgatcaacatggcaaaaccccgtctccactaaaaatacaaaaattatctgggtgtggtggcacaggcttgtaatcccagctacttgggaggcttaggcaggagaattgcttaagcctgtgaggcaaaggctgcaatgagctgagatcgccccactgcactccagcctgggcaacagagtgagactctgtcttaaaaaaggaaaaacaaaaacaaaaaacagtagtggaaagtataacagagggctgcacagtggctcatgcctgtaatccagcactttgggaggacgagacctgaggtcaggagttcgagaccagcctggccaacagggcaaaaccccatctctagtaaacaatacaaaaattagccaggcatggtggcacgtgcctgtaatcccagctacttgggaggctgaggcaggataatcgcttgaacctggggggcggaggttgcagtgggctatcgtgccactgcactcctccctgggtggcagaagactccatctcaaaaaagaaaagaaaagaaaagatgacagaggagttgaaagaaaaaaactgaggaaatcttccacaaaggagatcaaaaagacaaaatatggaaaagagacaaaaatatgaaaaatagaaaaggactgacatctaatgaaaaaattccagaaataggaaaccaaggtatgagtgaaataaattatcaaataaattaatttcagaaaattccctaacactaaaggacatgagtttccagactgaaagggccaagagcacctggcacaatgggtaatgggtgctgaatagaaataggccaacagcaggacatgcattgtgaaatttcagaacactgaagacaattctacaagcatcgagagagaaaaatgacgacaaaggaggaaccaagaatcagaagtcacgcaggaagccagaaggcactacagtcacttcctcccctcagagggacaatgggcaggaagaggacagggcagcagcctcctttatggagagagttctttcagatgaaacggatgggagactaggggatatatacaaatggggtcagtttgggcttaactagagacagatacatagaaaatcatgcaaataaacatgattattaactccaatgagaaactaaaagttgtgtcagaaggaaaagaagtcatactaagtgttctggttcagctatgaatagcgtttgtgtatccttagcaatatcaatattaatattgatccaaccaaaatgacacaattatatggacaaatggagggactgaaagcacgtgtctgcgatgaaggatgaccaaagagcagcccaatctgcaccactagatatagtcaattgataaggcctaatactgaacaattgtgaaatggtaataaaaatatttcacatggaaatgaaagttaatactaaaatattcatctggaagaactgaaggtggttgtctcttggagagaaaggaaagaggggttgccaagaactactgattttcatgataagccttgttgaatttttttttaggcagggtctcgctgtcacccaggctgaagtgcagtggcgagatcatggctcactgccgccttgaactcgtggactcaagcgaacctcccacttcagcctcccaagtagctgggactacaggtatgggtcacagagcccagctaatttttttattctttgtaaggatttttgttgttgttgttattttgttactgttttactgttttttgtttttttgagatggagcttcgcccttgttgcccaggctggagtgcaatgggctcacggcaacctctgcctccccggttcaagtgattctcctgccttggccttccaagtagctgggattacaggtatgcatcactacacctggctaatttttgtatttttagtagagatggggtttcaccacgttggtcagactggtcttgaactcctgacctcaggtgatccacccacctcggcctccaaaagtgctgggattacaggtgtgagccaccgcacccagctggtattgctatttttgttgttttttttctcccaaatatctttgatctgcagttggttgaatctacagatgtggaacccaaggatatgatgggctgactgtactcatttattaatattacttattatatttgttcagttatttcaaatatggatctatttctacataagtatattgcaaacttctggaggatgggcatggtggacgattcctttttgatacctaccaaagctatgtccgtagtagatgcccccaaaataattcatggataaacataaaggtcaaattcaaggtgacttgatatgcaaagttaagtcaaagtctggagataaaaaccaaggttagattaaagctgacactgtaaatagttaagacatttggagaacctaagtacatcaagacagagctgcattcaaagttctgtggtctacttttttggttaatgtttatttgttttaatgaagagatacttttgttcccaaagtactctcaagtttcaagttttggtgacctgggacttggtatataaacgtgagcttactctgccaacaccctatgtgactttcgagactttgtgcctgcctcctttgttttcctagattgcaaagtcgtaatctccacacactgagatactgaacttcttttattgctggtctgatacgattgacaagagagagattagtttcttgtcccttgctggaggtggggagatgaaaacaccagggagaaaaatatagtggaagatcatcttgagtcgatgttcagaatgaggagtcctcgatcctgggccagcatcagtccatggcgcttttggtctcactgtggtttcactccccattaaatggggaaaatacttggcattttctgacattccgggttctacatatgcatatcagtaaatgtaatacacacgttaagagaaaggcaggccaggcacggtggctcacgcctgtaatccctgcactttgggaggccgacgcaggcggatcacctgaggtcgggagttcatgaccagcctgaccaacatggagaaaccctgtctctattaaaaatacaaaattagcccaggtggtggcacatgcctgtaatcccagctacttgggaggttgaggcaggagaatcgcttgaacccggaggcagaggttgcagtgagctgagatcgcaccattgtactccagcctgggcaacaagagcaaaactccgtctcaaaaaaaaaaaaaaaaagagagagagagagaatgaaaggcaaaaatcacatgatcatctcaatagatgcagaaaagcatttgagaaaatctgacatcctttcatggtaaaaactctcaacaagttaggtatagaaggaatgtactttgatgtaccttggaatttaccttgcatgacaaattcgcagtgaacatactgaaagctcttccactaacaccaggaacaagacaaggatccccactctcaccacttatatttgacatagtaatggaaatcctagccagagcattaggtgagaaaaagaaatgacaggcctccaaattggaaatgaagaagtaaaactgtctctatttacagatggctgatcttatatatagaaaaccctaaagacaccaccaaaaacctgttagaactaaataaagttgtaggatacaaacgttaacatataaaaatcagtagtgtttctatacattaacgaagaactattcaaagaaaaaaaagaataagaaaacctccattttatttcctattttattttaattttgttattttgtagagagagggtctatgtcgcccaggctggagtgcagtggtgcaattttggctcactgcaacctccacctcctgggctcaagctatcctcccatctcagcctcctgagtaactgggactacaggcacatgccaccatacctggctaatttttttgtagagatggggttttgccatgttgcccaggctggtcttgaactcctgggctcacgcaatctgcctgcctcagcctcccaacgtgctggggttacaggcatgagccactgcgcctgatttatttatttatttagagatggagtcttgctctgtcgcccaggctggagtgcagtggcaccatctcggctcactgcaacctccacctcccgggttcaagtgattctcatgcctcagccacccgactagctgggattacaggagtacaccaccatgcctggctgatttttgtatttttagtagagacacagggtttgccatgttggccaggctggtcttcagctcctggcttcaagtgatgtgactgccttggcctcccaaagtgctgggattacaggcatgtgacactgcacccagcctaaaaggtcccatttatcaaagctatataaaatgtaaaatacttagaaataactctgatatcccaaaacaggggaaacttggagcgatcaacaaatccgatcagtgagctttttttttcccctttttcctttgtgagatggagtctcgctctgtcgcccaggctggagtgcagtggcacaatcttggcttggctcactgcaacctctgcctcccgggttcaagcgattctcctgcctcagcctcctgagtagctgggattacaggcacgtgccaccatacctggctaatttttgtatttttagttgagacggcgtttcaccatggtgctcaggctggtctcgaacttttgacctcatgatccgcctgcctcggcctcccaaagtgctgggattacaggcgtgagccaccgtacctggcctttttaagtgacaaggtctcactctgttgcccaggctggagtccagtggaccatcacaggtcactgtagcttcaaaccctgggctcaactgatcccatctcagcttcctgagtagccaggattacagacacacaccaccacacctggctaatttttaaaaaaaaatttttggccaggcatggtggctcacgcctgtaatcccagtactttgggaggctgaggcgggaggatcacgaggtcagcagtttgagaccagcctggacaacatggtaaaaccccatctctactaaaaatacaaaaattagtcaggcgtggtggcacgtgcctgtaatcccaactactcagaaggctgaggtaggagaatagcttgaacatgtgaggcagaggttgcagtgagctgagatcccgccacggcactccagcctgggacagagctagactccatctcaaaaaaaaaaaaaaaaaaaaaaaatttgtacatctgctgcccaggctggtctcgaactcttggcctcaagggatcctcccaccttggcctcctaagtagttaggactacagttgctcgccaccatgcccagtgccatcagtaagctaaggcttacacttttctgatcacagctacagggacagctggtcttactgcccaggttcctcatggtcacctcctatttcctaatgtaagtcatctcctcacaactacgggcaaaggggcactgcttttcttcaactctaccaggccacagaccctcccaggatgtgctggtgattttgctgctgccattagttcagctgtggggcaaaagcagcgcggtggatggtggtctcagggcaaactctgtagacattaattctagagaaaaccctctggaaggattagcatcttagccaagaaactttaaccctcaggttggagcattttctagttggctcttcttgtgttagtgagaggaatgaaagaacggaggcattagagacccacggatggaggcaagccagcacctccagtgttcggagtaaactcctgaggcaccaggcctgcctcccacagaaatcgaaagaaaacctatcctgcctctcactgggtcataaattacacatcgtccccttccctgagccttcagggaaccgaagcatgttccactcctgccaccgaccttcctcatctttgggactcctgtctcgatttctcactgatcacaaaaaatgatcttcacaaagtcttcctgcattgtttctctgccatttctatgaagcttctgcagactttgggagttactgtcttagctagagaataatagtggatcaaagaggacagactataccctctaagtgcccccacacccagggccacccattggcactgcctgaggaggtccagtctcaaggtgaggagatggactaggagggaaactgggcccccatcagtcagcgcttctcagacactgacatgcaactaacaggtagggttcttgacatacagggctcttgctacaatgcagataccgatttaggagaggagcccaagattctgcatttcaaatttcccaagtgatgttgatgctgccggtccacagaccagactgcatttgcatagcaaggagcaagactgaggggaggtgaaaaaatagaggaaaaacaagctccatgagaggcgatctgatgatgctccagatctaaaacctcttgtcttcaaggacttccctgcagggcctttcactttttccagaggattggagcacacagccttccaggcccagccacatgctggtaaagggccaggggcctgagacctcctcacaccctccgtcagcagctgtcagggagaggagccctgcctgggctggcaatcaaccctcgctcctgccgctggctctggggtggttctgccatggaacagcaggttcaagatggcaacagggtaacagatggtctctcttccctccacctctgcctcatcccaggctctgctccctgaagccaaagcagtgatcctctttactttctcaaacagcagcttactttgtgccaggctgtgtgaaccaccatctggaactgtttttatttaatcctcacaatcaccttgtgaggtaggaattgttctatccccactttagaaggaaactgaggccccatcactgaactacatacctgtgaggccaggagcctatgggactgaatctaggagagaagcctcaggataggaacttaatgaaaaatcaaggcaactaaggtgcattgattggtataggacccttcaaaggtaagcagaaagccagtgctgttactgtccttctaccaggttcccttaccatacaccagtggcaggaggttctcctgtgccagctggtacaggtaggtcatgaactgggctccttggcctgggcagagggtgccaggcagaggcatgactgaccaggcagcaccaactgtgtgaagagcagctggcctgctaggcagctggtggaaggccatttaggagtctgacgtaaatgtaggtaggtacttgcctacctatccatacctcaaaggaacatggtgtcctgggatggaaatgcacacgattccagctcttcatttgataaacctaagtgcccacaagcactgtgctaggctttgtgggagggtttaaaacacagtctttgcccttagtgaggaaaattagcatgctggatataaaagagtggtggaaactttagtgaactggagaatgctactcagctaaaacttgtactaccttactttagttggctggagcctctctgcaatgaaggactacctgatttttcaagtcccaaatcaagatcatgtgaacatttccctttttagaaacgaaaagaacttggggataggtggtcagaaaataaaatggaacaattcaaaaaataaatcctcaaacgcaggccaacatgtggctgctagtttgcaacctgtgctcctcattaccccagtcctatattttcctgttgtacctccagcacctcacaattcctggcagaacagaagtgcctctggtatgaccacgtgaagctcaaccaagagacccaccagagtggcaacggatctgaaatttccatcatatgcagaacagctgaagcaactggagagggtttttagccttggaaatgactaacaggaggcataagagttgttgcaaataagaacatcctttaaaaaagttaggatatatagtctggtcaacactttggagtggggaggaggttactttcaggtaaaatatacatctgacaactgaccacggttccccaactacttctactgtccatacccacctcccccatttcttcactggcccagtacctaaaagcatttggctgtcatatctggtaaagggaattcaggctttgccttataatttttttttgttttattatttttttgagacggagtctcactctgtcaccatctggagtgcagtggtgtgatctaggctcattgcaacctccacctcccgggttcaagtgattctcctgcctcagcctcctgagtagctgggatataggtgcccgccaccacacccagctaatttttgtatttttaggccaggctgatcttgaactcctgacctcaagtgatccacccacctcggcctcccaagtgctgggattacaggcgtgagccaccgtaccaggcccaggctttaatcccaaatatctcacctacttcctacctaagaatcttatctaactcaggattttttttttttttttttttttttttgagacggagtctggctttgttgcccaggctggagtgcagtggtgcgatcttggctcaccgcaaccttagcctgccgggttcaagcaattctcctgccttagcctcccaagtagctgggattacaggcatgtgtcaccacgcccaactaattttgtatttttagtagagatggggtttctccatgttggtcaggacggtcaaactcccaaactcaggtgatccgcccgcctcgggctcccaaagtgcggggattacaggcatgagccactgtgcccggctaactcaggatttttctaaggattaaaatgagatatgtaatgaaagtatttggcagaatatctggcaaaggggtcaagaaatgttcaacattattatggaggtttagatcttttctcccgtccgagtactaaccaggcctgacccggattagcttccaagatcagatgaggtcgggagcattcagggtagtatggccgtagaggtttaggtcttttctataaaacaccaaataatacaactatggtcaaaacacagaagttgcagggagtctgattttggcttcataaatgatacttctgtaacaatgccagctggaatgagattacaagtgtgaatgttcaaacagagcagcaaaggtcattcctcaggggactctggaggagattcctaccccaggtaggaagttggttgatttctgctctgatcctatgactactaaatgcatagtatgaaaaactacacttataatgtgcattaacaagaatatgactgatctccatggatatggaaagatatacaaaatagaattgggggggggaaattatagaaccatacaatgggagcccaagttttaaaaaccagatatatatttatgtgcttagagcatttcaggaagggtatattaagaaatttatttggaaaatcttgagaggtaagctggagtgaatgtacactctccactccatgcccaaatgtttacttttcactttatacccttctgtttatttttttgaccagcagcatcaactttttaaaaaaggaccaaataggccaggctcagtagctcatgcctataatcccaacactttgggaggcaaaggtgggaagatcacttgagcccaggaattcaaggctgcagtgagaaatgactgtgccactgcactccagcctgggcagtagagcaagactctgtctcaaaataaataaataaataaataaataaataaataaataaataaatcaatcaatcaataataaataaaaaaaccaaatcatttggttggccaaaaccttctgatctgagctttgctcggcaaccactctccaagataaagctttatgtatcacctcacatattcactgtcaaggctcaggcactctagattactggactccccagtcaacattcccattaccaaaagtccctaatcttggaggctgcttcaggtcaccctctctttgtccctcacttcctgagttttttttttttcctccaactatactcactctactggtgatctcaaacagccctctagcttttaagatactgtccaaatgctgactcccaaatttctatttccatccaagacccactcttaaactctagacacacacatgcatcgcaactgcctcctcaacagctccacttggatattgagtagacatctaaaacttgctcttcccacagccttgcaactcagctgatggcatgtccaggcttccagttgcccaagtccataacctcagagttagggaaagttgagtgtgacccacaatgccagctacctagaaactaaggtagatctaggtactgggattaaagatatcataaaatcattaaaatgttttctgaaatgtttgaagttaactcattttatttctaggatttggatttcaacattttaatttctttggaatataagtcactttttgcaagctaaaaaatagaatcaaactaaggtgatctagtcctctaggcatccaggctgatccttggaatcatgagcagaatgatgacatactacaaggtgctagcaatacggctataaactctaaataataaccactacatgtttcattaggaaacagccaaaagtccggccgttaaaggaataatctgcagaacatcttgatttacaagggacaaaatgatgcaaattatatgctgtccaacctactggtgaactggatcagaatggtccaaggactgttaaacagaggaagtatttacattttgaaaacttgctctgcaggataaaaaaattcctggttgctgtcagtaagaaagcaagtaaaaaaaatattacagatgaactcactgatctttgattttactaaggtcttccactggaacatgaaggtagggataagtgtacaggataatatactcagatatttttaaaataaattacttaataataagaaattagccataccacattgttccatttgctacaagaacaaattggcaatgaagactatttaaaagaaatgctcagctctacagagggtggtggcaggcaacacttttccattacagaataacctctattcttccatgatacatattcctgtggaaaaacttgtcagggcccagggatgaaaaatagagcttgtcctaattagctaactgtaggttcacttaacatctttgggaaggacccaaaaaatctggccattattttcttaaacatctgcaagctgcagaattccttagtcctcagctatagtttctgctagatatcttaaagctgggacagttccactgtgactcctcctcagctatggggtgggtgctagtcatcaaagtctggaatgtcatcataggagtaaccacggtagcctttggatgcatagtaagcgatgcgcaggtggtaaaatccgggtaggaacaccagaatgccaatgatcagcactggaacggcccggtctgccccctggtggcagaaggaggcaaacacattagtaccgtaagagttacacattttaaaataaaacgtcacagacctaatccttagatcagtattttatactcttcagtactttttctttgagttgtataccaccaagggaaaaggtttcctcctgattataaattgaagacaaactacaaaatattaacaattataaagaaaaaaatgacccattctcatccagatattttggcttcttttcctttttttaaagctcttagttgtgaacacaccatactctgtgtcctgtggccaatattattaaaaccttttcatacatttaaactgtaaggatgtgtaacattccaccgaaatggacatactacagttttacctaactgccccacatacagctgctggacactttggttgtttttcaccttttgtaattgtacagataccactacaataaactctgtgtttttctcagcctttcaggttttcttttctttctcttttttctttttttttgaggtaagagtcttgctctgttgctcgggctggagtacagtggtgtgattacagctcactgcaacctcgacttcccaggctcaagtgatcctcccacctcagcctccaagtagctggagttacaggtgtcagtcaccatacctggctcattttgtacatttgtttgtttggtagagatgaggtctcgctatgttgcccaggctggtctcgaactctggggctcaagcaatcctcctgcctcagcctcccaaaatgctagaattataggcttgagccactgcacctggctggctgtgttccctgttgtgtgttaattatagtcagaattggttcaagacaacttggacactgtgtatgtggggacagcccatgagaaagaaccaccaactactttaggtttctaaggtttcatattgaagctcaacaggaactccaaccaaacctactgtaagaaggaactgacttacgaggcacagtgaccccacacatataacagaattgctatttctctccaaatactgacagtatgtccatggcactgcacagctacaatgacagcatgctgctccagctacagccctttaccaatcaggactcctgtatgccaggctcagccatgttgttccaaactatgacagggcaaactgtctaatatctcagaggccaagtttgcctacctgccaccacctcccctataggaactatggaagtttactgttgctcaaaggaagaaaaacatgttttgccaacagagaacaaaatgtaaaagaaaatctttttggtttttctgctggaatctgctgtaccagacatgaatataaaaacaaagattgaacaatgaaaaaaatctaaaacctgaatagacaaagagtaatgagattaaggccataataaaaagtctcttagcagagagaagcctgggactagatggtttcgctgctgaattataccagttaaagaattaatacttggctgggcatggtggttcactcctgtaatcccagcactttgggaggccaaggcaggcagatcgcttgagctcaggatttcaagaccagcctggtcaacatggtaaaatcctgtcttgacaaaaaatacaaaaattagatgggcatggtggtatatgcctgtggtcccagttgctagtgaggctgaggtggcaggatcacataagccggggaggcaaaggttgcagtgagctgagatcgcaccactgcactacacctgcatgacagatgagaccctgtctcaaaaaaaaaaaaaaaaaaaaagaatactaatcctactgaaactattctgaacagacatggagagaatacttccaaactgattctactaggccagttttaccctgataccaaaactaggcaaagacacatcgaaaaaacaaaaataggccaatatccctgatgaacattgatgcaaaaatcctcaataaggaggataatactagcaaactgaattcaacaatacattaaaaagatcattcatcaggaccaagtgggatttatcccagagaggcaaggatggttcaacttatacaaaccaatcaatgtgataaaatcgtatcagcagaatgaaggacaaaaaccatatgattatttcaatcgatgctagaaaagcatttgataaaattctacatccaccgggtgtggtggctcacgcctgtaatcccagtactttgggaggctagggtgggcctcacactgaccataattaacacacaacgggaaacatagtcagaggggtgcagtggctaaagcctgtaattccagcactttgggaggctgaggcaggaggattgcttgagcctaggagtttaagaccagcctgggcaacataatgagatctcatctctaccaaacaaacaaaaaaattagctaggtatggtgactcacacctgtaactccagctacttgggaagctgaggtgggaggatcgactgagccctgaagattgaggttgcagagagctgtgatcacaccactgtactcctggactgcttgagtctaggagttcgagatcagcctgggcaacacggcaaaacctcatctatacaaaaaatgaaaaaaaaattaaccaagtgtggtggcacatgcctgtggtcccagttatttgggaggctgaggttgcagtgagccgagatggtgccactgcactccagcctggatgacacagtgagattctgtctcaaaaaaaaaaaaacaaacaaaaaaaccaaaaaacaaaaaaacatacactggggaaagaaccagtcttttcaataaatggtattaggaaaactggatatccatatgctgaagaatgaaactagacccctcaaatctcttgacatatacaaaaatcaaatgagaatggattaaacacttaaatgtaagacctaaaactatgaaactactataagaaaacatgggggaaactctccaggatgctggactgggcaaagatttcttgagtaatgcccccaaaagcacaagcaaccaaaacaaaaacagataaatgagatcacatccggttaaaaagcttctgtacagcaaaggaagagacaacccacagaatgggaaaaaatatatgcaaagtatccatctgacaaggaattaataaccagaatatataaggagctcaaactctgtaggaaaaaaaatctaataatccaatcaaaaatgggcatttctcaaaagaagacatacaaatggcaaataggtatatgaaaaggtgcttaacatcattgatcaaagaaatgcaaatcaagactacaatgagatatcatctcatcctagttaaaatggctttttaaaaaatatagacacaaggtctcgctatgttgcgcaggctggtctcgaactcctgggctcaagtgatcctcctgcctcggcctccaaaagtgctgggactacaggcgtgagccactgcacccagccaaaatggcttttatccaaaaaaaacggcaataacgaatgctagcgaggacgtggagaaaagggaaccctcgtacaatgttgatgggaatgtaaattagtatagccactatggagaacagtatgaaatagaactaccatatgatccagcaatcacagctaggtatatacccaaaagaaaggaaatcagtttatcaaagaggtatctgcacttccatatttatgacagcactattcacaacagccaagatctggaagcaaccaaagtgttcttcaacagacaagtgaataaagaaaatatggtacatatatgcaatggagtactattcagccactaaaaagaatgagatcctgtcacttgcaacaacatggatgaaactggagaacgttatgttaagtgaaattaagccaggcacagaaagacacactttccatgttctcactcatttgcgggaactaaaaattaaaacaattgaactcatggatattgtagaatgatggttaccaaaggctgggaaaggtaggggggaatggggaaggttaacgggtacaaaatatagttacatagaatgaataagctctagtatttgatagcacaaagtgactagagaataatttattgtacatttaaaaatataataactaaggctggacgtggtagctcacgcctgtaatcccagcactttaggaggcccacgcgggcaggccgcttgaggtcaggagttcatgaccagcctggccaacatggcaaaaacccatctctactaaaaatacaaaaataagccaagtgtgctggcttgccaccatagtcccagctaactcaggaggctgaggcaggagaatcacttgaacccacgagccggagtttgcagtgagctgagatcctgccactgcactccagcctgggtgacagaacaagactctgtctccaaaatatatatatatgtatgtatgtatgtatgtgtatatgtatatatataactaaaaataggccaggcacagtggttcatgcctgtaatcccaacactttgggaggccagcctgggcaacatggcgaaaccccatctctactaaaaataccaacattagccgggtgcggtggcgcacgtctgtaattccagctactcgggaggctgaggcacaagaatagcatgaacctgggaggcggaggttgcagttagccgatattatgccactgcactccagcctgactctgtctcaaaataaataaataaataaaagtataattggaatgtaatacaaatgatgaatgcttgaggggatggataccccatttagcctgatgtgattattatgaatgcatggctgtatcaaaatacctcatgtatcccctaagtatatacacctactatgtacccataaaaattggaaaaaaaattggccaggggcaatggttcacacctgcaatcccagcactttggaaggctgaggcaggcagactgcttgacctcaggagttagagatcagcctgggcaacatagtgaaaccctgtctctacacaaaataaaacaaacaaaaataagtaaataaaaaataaaattagctgggtgtggtggcacacacgtgtagtcccagctactcgggaggctgaggtgagaggatcgcttgagcccagggaggtaaaggttgtgccactgcactctagcttggatgacagagcaagaccctgtctcaaaaaaaacagaccactgggacggacaaacacacacacacacacacacacacacacacacacacacacacgcacactagagccttggctaacattttaaaaatctcacaacttattcccacatgcccgtcagcttacccctttgctgatgtagcctgacagcaggagggagcctataataatgagaaaggcgccaatcaaaaacagcacagtggcaagtgcgatggccttataagggatcttaggaggggttttcttaaactggaagagaaatagagatgaaaaagacaacgaagaacattaatgcaaatacctgggttcaaacatttaattaattatttgtaatttttatgtttttgtttgtttgttttgagatggagtttcgttcttgttgcccaggctagagagcaatggcgtgatcttggctcactgcaacctctgcctcctggattcaagtgattctcctgtctcagcctcctgagcagctggggttacaggtgcccgccactacacccagctaatttttttggtatttttagtagagacagggtttcaccttgttgacctggctgggcttgaactcctgacctcaggtgatccgcccgcctcggcctcccaaagtgctggcattacaggcgtgagccaccgcgcccggcctaatttttatgattttagagacggagtcttgctctatcacccaggctggagtgcagtggtgcaattacagctcattgcagcctcgaactcctgggctcaagcaattctcttgcctcatcctctcaagtagctgggactacaagtatacgtcaccatgcccagctaatttttaaatttttctgtagagacgaggtctcactatgttgcccagggtggtctccaactcctgggctcaagggagtccttccacctctgcctcccaaagtgctgggattacaggtataagccatcaagcccagtctcaaacactttaaaacagggaggagagctcgcacctgtaatcccagcaatgtgggaggctgaggcaggcggatcacttgagttcaggagtttgagaccagcctgagcaacatggtgaaacctcgtctctacaaaaaatacaaaaattagccgggcgtggtggcatgtgcctgcagtcccggctacttgggacgctaagctgggaggatggcttgagcccaggaggtgaagaggcagcgagctgagattgcaccactgcactccagcctgggtgacagagccagagcctgtttcaaatacaacaacagcaaaaacaggagggtaattaagaaccaaactagatactttatgtgtcttaagtatgtcctaccacccagtgcagctctgagaaataaaagggactggcaagagatgaagctctagttattgctctcacagttactcaaaggaatctcagaggaatgtcattcactctagttcgaatctcattccataaatcattcattgtatcataagaaacttttctttaaaacaaaaacagaaatgactttacagtcattcatttgttagatatatatttattaactgcctggcacatagatggctgtactaacttatggggatttaagagatcctgtctctacaaaaaattttaaaattagctgggtgtggtggcacatgcttgtggtcccagctattcaggaggctgaggtgaaaagactacttgagcccagaaggtcaaggttacagtgagtcttgattgtgccactgtacccaagcctgggcaaaagagcaagaccctgtctcaaaaaaaaaaaaaaaaggctgggcgcggtgactcacgcctgtaattccagcgctttgggaggccgaagtgggtgaatcactggaggttaagagttcgagaccagcctggccaacatggcgaaaccccatctatactaaaaatacgaaaattggccaggcatggtggtgcatgcctgtaatcccccagctactagggaggctgaggtacaagaatcacttgaaccaggagggggaggttgcagtgagccaggattgcaccactgcagtccagcctgggcaacagagcaagactacatcttaaaaacaaaacaaaacaaaacaagaggctgggcaaggtggctcacgcctataatcccagcactttgcgaggccgaggcaggatgatcacctgaggtcaggagttcaagaccagcctgaccaacatggagaaacactgtctctactaaaaatacaaaattagctgggcgtggtggcgcatgcccgtaatcccagctacttgggaggctgaggcaggagaatcgcttgaacctgggaggcagaggttgcagtgagccgaggttgtgccactgcactccagcctgggaaacaagactaaaactccgtctccaaaaaaaaaaaaaaaaaaggaaaagaaggcaatttcagcttattccaaatgattagttgtttgttccacatagcaagtaaacctgccttatgaacaaattcaattcaaggttaagattcagagacaaattttccaaggtttggctcatcgttgtatctgacctaagtggctggaagcttcccagatctttccagatctatttttatctctccttcaaatgtgggtccaaagagtaatttatttatttataaaggatggtttcctgctacttcctcgttggccctagttccacgtagaacattctattgtaaggggaagtgtgcaaaaggagatgctgtagtattgactagtttataaatggttagggtaggatacaaacttaataaatactgtgttttacttactatttatcacaaagaatacctttaataaattggatctcatgacatcaggaaagaaggaagattcccacaatctgctggctttagtaataagtttctcccttaaaaggtgaacgggctttgactaaagtgtaaataaacagtgataaaaaaaattccacctaacaaaaattttaaagttccttaaaaaaagaaacaacaacaaaaaactccacttaacaaaacacaatctgattagtttctgaataaagtaaataaaacctgtaactacaaggctctcgcattacaactaaaaattcttagaaatggacaatactggaattggtttgaaactaccctgccacggccctcttctgcgattatggctgaaagggtctcagagctgagttttcttcttgttgctccttctaatccccaaggacagttagcaaaatctccatctggaaggtcttcctgctaacttaacagaaacacagccagtcagtcttgtcagttctcttctgcatttacctgaaggtcaatgtagccatcgtctgtgctggagagccttgaatatttcactttactactggggattccagtagccaggttggtacgggacggcatcataacacgctgacacagctacagtttaaaaacaaaaaacccgttattgtctgtagatgacaatggtgcattatagccaatgagttcaggattattagatgctgtgcactggagttctgggctgccatgtcagactagcaatgggcaatttacacttcactgctaaattttcattgtgtcagaggcatatgcatatggaaaaccagatatgcctctgacacagtgaaaagattctcactatgtattaaatatctagtctggtctgtccttgtagaatgacagtgaagacactcaccaagaatcacattccagtttattttgccaccaagattccctgacttttaatttttccaaagtcacatagagactaggtagaataatggggacttaaatctaggtccacctgacaccacagcattgcctgtcccctgctcccgctcttaagaaaaagcaagaggagcatatactcaaatgattctcttgtttgacagggagggagaagagggcagagaatggaatacactcacatcagcattttgcctatttccccttgatagagatcaaccttttaatgcaaaagatctgtaaagtttcttgccgtaaatttgtggggtttttttgttgttgttgtttgtttgtattttttggagacggtgtcttgctttgtcacacaggctagagtgcagtgggttgatctcagctcactacaaccaccgcctcccaggttcaaacgattctcctgcctcagcctcccgagtagttgggattatagccatgcaccaccatgcctagttaatttttgtattttttaagtaacgaactggttttcaccatggtggccgggctggtcttgaactcagtttttttttttttctttgcgatagtctcactttgctgtccaggatggagtgcagtggcgcaatctccattcactgctgcctctgcctcctgggttcaagcaatcctcctgcctcagcctcctgagtagctgggattacaggcgtgtgccaccacgcctggctaatttttgcatttttagtagagatggggttttaccacgttggccaggctggtctcgaacttctgacctcaagtgttctgcccaactcagccttccaaagtgctgggattacaggccactgtgccgggccccttgtaaatttggatacaggcctggctatactagtgcctccagaagcgcccacctctctgtcccatcccaagcactgaaagtagtgatttcattttcctaattacttctgtaccaaccttaagaaacggaatatggtataatatcttacaaaaaattttaaagaaagaaagaaaaaaatggaataacaacctggcttcttgttcaaaatattcaaagcagacagcagtaatgaaatcatggctattatgtcactagtttaagagacagtgggtaagtttgaaaaatcataacatttaaattaagaccatttgtattaataggccgggcgtgatagctcacgcctgtaatcccagaactttgggaggctgaggtgggtgggttacctgaggtcaggaattcgagaccagcttggccaacatggtgaaaccccatttctactaaaactacaaaaattagccaggtgcagtggcacacacctgtaatcccagctatttggaaggctgaggcacgagaatagcttgagcctgggagacggaggttacagtgagccgagactgcaccactgcactccagcctgggcgacagaatgagaccctgagtcaaaaaaaaaaaaagaaaattttttttttaatttgtccacttttcctccataaagtaacaaagctatatgatcaaaatgggtaaatatattttagtcagggtttttaaattctaaattcaaaaacatatctttaaaaaagacaaaactgaccaggcgcagtggctcacacctgtaatcctagcactttgggaggccaaggcagatggatcacaaggtcaggagttcgagaccagcctggccaatatggggaaaccctgtctctactagaaatacaaaaattagccgggcatggtggtgggtgcctgtagtcccacctactcgggaggctgaagcagaagaatcgcttgaagccaggaggtggagattgcagtgagctgagatcacaccactgggctccagcctgggcgacagaactagactccatctaaaaaaaaaaaaaaaaaaaaaaaaaaaaaaaaaaaaaaaattcagtatttcaataagggcataagggcaacataaaaaaaggactagtttttctctgggatggcatttttaaaattcatcattatcatcatcacaataatggtggttagtacttacctagtctttgttagatgccagctgttctaagtactttgtacatacctaattccaaaaaataacaaattgtttttctttttttttggtgttttcttttttttgagacggagtctcgctctgtcacccaggctagagtttagggacccgatctcagctcactgcaacctccgcctccagggttcaaacgattctcctgcatctgcctcccaagtggctgggactacaggagcctgctaccacgcccggctaatttttctatttttagtagagacgggcttcaccatattggccaggctggtctcaaactcctgaccttttgatccgtccgcctcggcctcccaaagtgctgggattacaggcgtgagccagcgcgcccggcctaactgttttacgtggcttgcagtcaatgtaaaataactagcataattaaataattggtgctaaatattaatatccgtttttattgattacatcctggtctagaaatcaagtatttaaaaattagcataatgttaatctctatacttttcaaaaaagattggatcaaactgtgtcaaatagtaggtttttagtgttgtgatcccggctgcatttaattctataaaacaaagttcaaactaccagtatgtgtggtttttgagggcatttaaccacatctaacttgcaattagacttttttttaaagtacgtcccctgacattaactgttcatacatccgcatcaaaacaatacatcgcaggggcgtgagggagaggggagacgaatgtttactcttggcaaagaggattctaaaagacgggaaaaataaaaacgagcattttcaaagtatcagtcttcgttgccaacaggctttttaccagctcaccgctacccccaaactccctcagcacctgaatgttacgagagttctaaaagcatcataaaacgtttggcacacagtgcctggcattacgcgcctctacatacgttattctcctacccgtcttcagaccttgccagggagagaaataagaaccgacgcgaatttagacgtaaaacaaacaaaacgggcttctggaaagaggccaactgtgccaggggggacgaatgccccacacggatgactcggagcttgatttcggcggggagcgcggtctcggacacgcccagagcccgagaggacggttctgtccccgccctgccgcacacacgccttaccggagcgccgcgccaggccgcccgcacacccagagctcgcccacggttggcagcgcccaaggttgcatggcatggcccgcttaagtgccactcagccggccccaggcgggatcagtgcgccggaagtggcgtgccggaaacaggcgcgtcggaagttgcgtctccggaagcgtttgtctctttacccagcttcccgggctaacccttaccgagtgtcacctgcaggaggcaccgggactccggggctgcacggcccgaatgcttcttcgtgggttttgtttaagcagccgcgacctgtgcctgccgccggctacctccgctgtggcgggcgagcacctagggtcctcacctacctgggtcacagtcaggtccagggcaagccggctacgtggtttctcccctcctcagtacaggggccaggctagagaccgccgtggcttcccagggaggcagaagccgagtccgtcgagcctcaggaccagcagtcagagcggccagatatccgctgcaaggcgccagccttccatgggcgcgcgccgtcaacaccccactaccacacttcccttgaatagcacacttgtctgtgctgtcagcaccccactatacttcccttgaatagccccacaaacttgtgcttatctttagggcttgtccaggtaaaaggcctgcccacaagggacattttgcggcaaatgaagctttttaaaaagttaggtttattgaagtatttatacacaagtacaaatagatgagctctgaaaatacatacggtcctagaaccatcaccaatctagatggaaatatatccatcaccccaaagttccatcgggctcttttgcagcctatttccttctccactcacaggcacactgtaggaaaatgaacttactactggacatggttaattctcatgtccagtaactagaactcagtccaagtaatttaagaaagaaatcagtcatttaatctaccaaacacaaaaatgcactggaaaaaaggattatgataaagcagtttttaaaaatgttttttctaaagccaaattgagcagcaggggttgtatacctactttagtgatactaatgttagtaagttctgataacctactactattaaaccagccaataattttttttgagatggagtctcactctgttgaccaggctggagtgcagtggcatgatcttggctcactgcaacctccacctcctgggtttaagtgattcttctgcctcagcctcccaagtagctgggactacaggcatgtgccaccatgcctggctaattttttttttgcatttttagtagaaatggggtttcaccatgttgaccaggctggtctcgaactcctgactttagttgatccgcctacctcccaaagtgctgggattacaggtgtgaggcaccgtgcctggcaaaaaattcttaatacacagcacacagtgaacttgtagctattagtgggaatgtttttaagtctttcttcacaacttcagggctttttcactttcttggttggatccaacatccgtggaatttaagacatcttcatcctttgagtgaagttgcaaagtgtacttatactagagaaattttgtacaaccatactccttgggccccattacagctctactgaaacatccaagactcttgtaagattccccaggctaaaaagaaacactccattaacatcttataaagcccacacgactttcggtacattaagcttctgaagagtattaatttttgccaagtaaaatgaaatacacaggatttgtactactctctcacttgttccttgagctcaaattggaataacaagtttgacaagtgaatcccctaaaatatctagtaacctactgtatttgaaatccttttgatctccatcaggctgctctaaactgaaaaaccatttaaacgaaagggtagctgtagctgggaattcagtaggatacttccaacagtcctggtcaaaatgaagacactgccctgtgatgtttgaaattcaagtaactttatttaaattcaaaaacaattcttaaaactgcatttagagtcaagacccttttgtattataaaaatcacaagtatttctaagagacaaaaatacttctaggttaactagaccagatctgactttggactttattctttaaacaaattgcagagaatagagaaaaaaataggttatttacagaaaacaatatctacatatgtacttagaggtacaaatttggtgacagaaaagacttcagtatatgctggcatcttagaagcagttctcaaagagcttagttttattttcttgaattttaagaatgcctaagatccttcttcatcctcgatcttgggagccaagtagtattttaagtgtcccatatccgcaattttatactctacaactgaaagacaggaagatggttaattactgaggagtatgtatcacatatgactacctacaaaacaaggttcaaatttattatcttaccaaggggtacatctgcagacatactgagtgtcaccgttgaagagagtggagtggcttttgtaaagaagttcaggtacctcagtgcaaaagttagttgaactggttcattcatctctatggtaacctacaaaacaaaagattcatcattgaaaaacatcaagaaagttgcaatctattagctcattatatatttataaaaacccacaaacacttgtattggtcactttggagggagctatgaaaattttgaagactgatacataaagcaaaagactcgattatctagcttgtctttcctatagctataatttagataaccaaattatataatatgggaaagcttttctttatggaagtttttctaataagcagccaataagtgaataaaacgtattaatttcagctctgcaaactctaattaatgacttaatggatctagacaatgactattatagctgctaacattgcaaacacatccagacaccctgtgcctcctactagaggcacacaccaccacctatattcttgctctctcacccccgaaacaaaacaccctgaatatcaaggctccagggctatagctaccagtctgtaggacacacagggtagaggaatttatgtatacacaggaatgcaatcagcaaaatccaaactctggaaaacttaataaatgatctaatttcttcaacaaatagattgtaatggaagggggaaaatgaaattaggggaaaccaggctaggtgtgttggcacacacctgtagtcccggctacttgggaaactgaggcaggaggatcacttaagccctggagtttgaggctgtagtgaaccgactgcaccaccgcactccagcctgggtggacagagcaagaccctgtctcaaaaacaaagaaaaacagaaaaagaaaaaaacgaggttggcaggagtggaaatgtgattcaggaaacagataaagaatcagctcctagactttattaatttaaaaaaaaacctttcaactgaattttacctttatttaaactaaatgttgactacccattcaagggacaagagagcaatatatagtatttattgtaagcttataatatgccacacacagcatatgctaagctctttaatgctaccgtatttaatcctaacaaggttatgaggttaggacctttgtccttgatttacaaagttttaatttatgcccaggttagcgagttttttttgtttgtttaagatggaatcttgctctgtcacccaggctggaggggagtggcatgatctgggctcactgcaacctccgcctcctcggttcaagtcattctcccatctcagcattccaagtagctgggattacaggtgtgcgccaccacacccggctaatttttatatttttagtagagatggggttttgccatgttctttctattttggttaaacaagggctctctaggtactctcaaagttgcatggagtctgctttctagccttagtgagaagtctccttcctgtttaacctttgattcctacagcctgtgactttggctaaattgtcacttaaggttgctcagcctgcttctccacctttaaaatgggctaccaattggacccacaacatgtaagctaatattaggattacataagtgctccaaacaggtagacttttactcctaaccatatccttctattgagctgctgtcctatgctcaattatttggtaagagagtaagtatctccagaaagctaaaggttatacgcctaacttcccaatcctacccttaagagccggtgtggacttgatccataaaccactgttctgtggtatgtacacgtgctgaatttgtattcccttcttgcaaatataattctaaattggatgacacttataaatcattcgcagatttcaacagtatctcaattttcagaaattacttgggatccaattctgtctacttttaattttagcaattaacctaataagcagtattataattctcttcaaactattttctttttacttaaaaactacttacagcttcctcctctttatcgacattacttgtctgtgacaatttaatgtttccatttccaagttctccacttgcagaaaatttcactccgtcttttgcacaggaaattacaacagcatctccaatatggctgagatctcggcatatacgtgcaaattcaccagaaggcatctttactacacagctgtactcctgttcctattaagaacaaaaattttccaaaagttaattgttagaaatttaatgatttggcaccctcactttcttaaaaggcaacacctaaacaactcagaatcaatattttctgattactttaaaatatgacttgcgtaatttcttaacaaactccactcaaaaaaataaatggctattaaatgcaccatccagggaacaagagcctcctcctcctcatcctccagggataaagtaagagaacattagagtatggcacagaaatcatgatggcgcaagcaggcctaactactttctaaaagaaagcaagagaatatattaggcattttcaacattcaaacatttcttctctcctttggtgtttataaacctaacctggataaatttcttccaagtcagctttaaaatccacttaataaaaagcaagcattctagaaggaaacaaattttaaaagaggttcatggaagttaatgcaaatagacaactggcagtaaacaataaatttaacctgtgagttttagacttgtggtgaacaactatccaaatactaaaatctctctttgaaacatgcaccagtagatatatttctagaaaaagttgttatgaagtaggcttaaattatattaacatatcttgacggaggaggatcacttgaggccaggagttccagaccagcctgggcaagactgcccccacgcccacacacaaaaatgaaaaaattagccaggtgtggtgggacaggcccgtagtccttcctagccacttaggagactaaggcaagaggactgcttgagcccaggaatcccaggttagagagagctatatggcactactgcactccagcctgggcaacagagccaagaccctgtctgtaaaaataaacaaacattctatgacataactatcgtgcctgtgtacagcactctctacaatgagaaactgatactcactggaattccaagttgttcaacatctaaatccatcaacttcatttcatagtctgaaactttctcctggtctaccaaaagaaagcagatgcttttgagaaatactgacacagagttttgattttctgtagcttcgtgactcggtaaaaaggtacgacttacttggtgcttcaaatactagcgccaaggtatccgcgttatcttcggcccttagtgtaatgatatcttcattgccggcgcattttagtattttggacatactagaagacaggagacacatgctttaaaatcaacgccgtctgctgaagggctgtatttcgaacgcggttagaaggggttaccactctcacccatcaggccgtctcagaactggtggagggtaagcggactgctggaggatgccattattaatgcagacgttttgggacgcatctggcagtatttatactaaaataccaccagcagtgtcccttctggatagaaacaatctcctgccactaagtaggatgacaggctgccacatttctcgcaagggcattataaagcatttaaagtcaaccgcgactgagccgggaggatcgcttgagcccagaagttggagaccagcccgggcaacacaccgagaccgtctcagaaacaagaaagccacagctaaagcgtccattcaaggccaacaggatttagtgagcaaagagccctggaacagtgttcctggcactgcggaaaaacccttgattttcccgccaccacccgctttgtgactttggcgcgaaaaagcaggttcgcgcagcagccagcgcgggcttttccgaaccgcgcgctcagctgggccccaccccactgcgtggcaggccaatgagaaggcgcggatggcccacgccagccaatgagggctaggctcgaaagcgctcccgccaagcaccggaggtgcaggcgggccggggccggcttcccggggccgcgaggctcacctggtgaggttcacgcccatggccaggttgcggtcgcagcggtaggtgtcgaagccctcagaccgcagggtgagctgcaccaaagagacgtgggacgagtccatgctctgcaggtttacaccgctggagctaatatcccagcaggcctcgttgatgaggtccttgagtgcctccaacaccttcttgaggatggagccctggaccaggcgcgcctcgaacatggtggcggagtggcaacaacgccgctacaggcaggcgggaaggaggaaagtctagctggtttcggcttcaggagcctcagagcgagcgggcgaacgtcgcgacgaccggctgagacctagaaagacaacgaccactctgctacgcctgcaaccgtttaatgccgccgcgtccgcaagcgcgcgctctcaccctgcgccgcgttgcgacgtcaccacgctgtccagcccacggccttgcggggaagactttagggccaatcgtgtccatgctccccgcgaggcccgccccctagagcatacattggaggaagcgggcgcagggcggggcagcgtcgcgcaggtctccccgcctctttgactcctgaacccggccgcagaacaagtccgggcatatgtggagatcgggtcccggtcccggctcgtcaagccccagctttatggtggctcctcagcctcccactacgtgggtagaaagtttccagccacgaaagtgaaagtgaaatgcaaatcaagcctaccgggaggaaaagcctccttgcagcctgaagagagtacagctgctgcaaatatgcactttatttttcaattacagaattgatgcgctcgtaggtgtcacaagataaagaggtgaattgttctgttaaacttagctccctatcatcctcttaacattcccccgccagctcttataatcactcaatcgttcattgtataaagcttttaaagcttttttaaaagttcgaatacactttttttttttcaaaaatgcactcattccgtaaacacttggaaaagtacttaataaagtacatttaattttatgccacgtacatcttttatcatatcagtacctctttaaaacatagcatcacatgtatataacataatttatcaatctcctgttgtttaactacaaacacctttgagcacttaggcaattttggtgatatcaactccttgaagtaatacagctgagtcaaagagcgtacacatttaatattttttcttttcttttcctttctttttgagatggagtcctgctctgtcatccaggctggagtacagtggcgcgatctcagctcattgcaacctccgcctcccaggttcaagtgagtctcctgcctcagcctcccgagtatctgggattacaggtgcctaccaccacccccggctaatttttgtattattattattatttttttttagtagagacggggtttcaccatgttggccaggctggtcttgaacacctgacctgaggtgatccacctgcctcggcctctcaaagtgctgggattacaggcgtgagccaccacgcccagccagaaattttcaattgttacaggatggacaggatttgttgtttctctcttgctttcttcacaccacttctctttagttacttttaataccttggtcagcagaattctttagtttttctaccatgtatctaggtatggagttagttttatttgtcttgttgagggaactgaagattcatttcaagtctgacatattctcaatcattatggcttcaaatatctcctctccttagtctattctttatctctggaatgcctttctttccttttttttttttttttttttttcctagttcagctgtgactccatacaaggttctaagatgagtttcacagtctcttccctggattttgtggagacttaactttacccttctgtatcagcctcttaaagcactgggtcagccttaaaagggaacaggaaagggcatttctattataagatgccttcaattgtaatatgtaccattattttatgtagcacaagcaagaaaactgtcaaacttttttttttattattttctagagaggggagtctccctttgacacccaggctggagtgcagtggcaagatgactactcactgccacctccaacttctaggctcgagagatcctcttgccacctcccaaatagctgggactacaggggtgcaccactgtacctggctaatttttaaatgtttttgtagagagaaggtcccactatgtcgctctggctggtctccaactcctgggctcaagcaatcttcccaatcggtctcccaaagtgtgagattacaggcatgagccactgtgcccagcctcaaactgttacacaatgctttatcacttagaatttctttttttttttctttttctttttcttttttttttttctgagacagagtctcactctatcacccaggctggagtgcagtggtgtgatcttggctaaccgcaatctccgcctcctgggttcaagcaattctcatgcctcagcctcctgaatagctaggattacaggcatgcgccatcacacctggctaatttttgtatttttagtagagacggggttttgccatgttggccaggttggtcttgaactcctgacctcatgtgatctgcctgccttggcctcccaaagtgctgggattacaggcatgagccaccgcgcccgggtctattttgttttaaaagaacttttagactttaaaaacattcttattatatattactcttgtgcaaacatgaaaaaatttaagctacattggttaaggcattcctactgtttctccactcagttagttgctgattctgctgtttttctgtataatatcctactctgtgttgtcaagggtattgatgatgcagtatttttcaatagtgctattctattgtctctggaatttcttgcaagcctctgctactcatttgtaagttttgatgttggcactttcttgctttatgtgtgatggactacccatttgcatacatctcaatatcaaaacataatacagcatcatctgtttgtggttcttttcctttcttgggtccgttaaaatctcagttcctttgcaaaatgtggaatgtgttccttcctccagtgaggaacatttgcttcactaaaaacaaatgcatatgctccactactctgtttcagttctgtctgcttacataataacattttggtttaatgccaaattacatgtaatagatttgaagacattttaaatgacaaactctatccatgggggatccaccatgtacatcaatctgtttatttctgctctattacagaagtgatgtcctcctaaaagtgtcaaatgataaagaggtgtacagttacgtaaattttatgttaaactgaaatgaggacataaacatgcctatgactgtggtcagagaaggcctctctgaggaggtagcatcttatcagagaagacagctgcttggagagttggaaaaaagcattctaggctgagagaatagcatgattataaaggtcagcatacttggaatatattcagacaagtttgatgtagaactcagactgatgtgtctgaagcaagagtggtgcaaggtgaggttgcagagaggctggggtgagctcttgcaggactttgtaggctctctaaaagtgcaagggaatgtggtcaacagcagatctttgatgtgatccaatttacattttaagtggctactctaacatctagtaaaggtactattggatcagtgggagaaagaatgaagtaaattttgatcagataattggttaaactattagaaaagaataaaagctgtagacttttctggatgggcgcagtggctcatgcctgtaatcccagaactttgggaggctgaggtaggtggatcatctgaggtcaggagttcgagaccagccaggccaacatggtgaaaccccgtctctactaaaaatacaaaaattagctgggcgtggtggtgcacacctgtaattccagatactagggaggctgacgcaggagaattgcttgaacccgggaggcagaggttgcagtgaaccaagattgcgccactgtactccagcctgggtgacagagcaaacctccatctcaaaaaaaaaaaaaaagacttttcctaataattattcactaaattctagataaagaattcaaattcaaatcttgacccaataagaaatggaaaaatattttggtaaatatttatgagatcttcctatgggcttccaaacataagaaaaaaacccataaaacataatgaataaccatacaagttttaagacttcagtatgcctcaaaggattatattggttagtatagtttaggtttcagtgacagagaactcaacttgaatggattaagagaaatagaaaatttattcatctaaacaaaaagccagaggtatctggcctccactgtccagtcctagtcttcataaacgtgaagtttgttagccacattaataagcaaagaaatgtaaattcaatggagacagaattttaacctaccaaattaataaaaatcatgttaacacctggtgtgttaggaaggattcaaggaagtaggcacttaaatacattgcaagtgggagtatacattggtataatttttctggtggaaacttagaaatgtgtatcaaaagccttagaattttacttattctttgacacagaaattcgatctctagggttttttcctacagaagaaatcaggggcatttaccaagatcaagcatgcttaagaatgtttcttgagccaggtgcagtggctgatgcctgtaatcccagcactttgggaggcccaggtgggcggatcacctgaggtcaagaattcaaaaccagcctgacctaaaacccctgtctctactaaaaatacaaaaattagccagctgtggtggcgggcgcctgtagtcccagctactcgggaggctgagacaggagaattgcttgaacctgggaggcggaggttgcagtgagccgagatcacaccattgcactccagcctgagcaacaagagggaaactgtctaaaaaaaaaaaacaaaaaacaaacaaaaagaaaacaaaaaacgaaaagagagagagagaagggctctaaagctggcctaaagccctattagcatcacttccaccagacccctgttcgtcacacagtactgacttcaggaatatacttgatctgagttccattaacctgagagggctgagtgtaatggatgagaagtttgttcagaccacatgttatccatcctagtaatcatgctgtgcattctataattctgacttatgtgcattgattctccaagcctccttttattaggctggatttgaaaaggagcagctgagtttctagaaggactgacatgacactcacttagatatgacctttcatacctacgtgcccctgaaggtgaagttctagacactaacatcttcacctgtcttagaagatcatcttgctcgagtgctgtggctcatgcctgtaatcccagaactttaggaggcctatgtgggaggattgctcgagcccaggagtttaagaccagcctaagcaataaagtgagacttcatcgctacacaaaaatttaaaagttagctgggtgtggtgctgcacacctgtagtccaagctactcgggcatatactcatatagaaatcaggaatatataatgctgttttcagaattctcactacctgccccaaaactcacagctcaggtcaaaattaccaataggaaattttagccaggcatggtagctcatgcctgtaatcccagcactttgggagacctaggcgggaggatctcttgaacccaggagttcaagaccagtctgggcaacatagtgagaccctgtctctaaaaaaaggagaaataaattaattaaaatttaaaaattgaaaagaagaaaaatgtaaaattatatttttttaaaaaacgaaattgcaattcttttgtgtgcaagtgtctcattgtgagattacagtatgcttaagttggggacgcagtgttatatgtgttttacatcacttacagggcagtgaatagaaagaacaggaaacaccaaaggcaatgctggagcaacacaagtattaataaatgcaggcaggcagtatagtatggtggttagagtgtgggctggtaacaaacctgtttgtgttctaattcttactaggcactttctagctgggagaccttggctaaggtccttttaaaagttttaaatccatccaacaagtacttacaatggatgtgtcaaagacatagaggatgcacagtaaacaaagtagacagcacttctgtcccaaaaaaggtctttccatagtccagaagacaaatttgaaaaactgaggaagggccaggctcggtggctcacgcctgtaatcccagcactttggaaggcggaggcggacggatcacctgaggtcaggagttcgagaccagcctgaccaatatggtgaaaccccgtctctactaaaaatacaaaagttagccgggcgtggtggcgcgcaccttggaattgtttgcgcccgggaggcagaggttgcagtgagtcgagatcatgccactgcactccagcctgggcgacagagcgagactccgtcacaaaacaaacaaacaaacgaacaaacaaacaaaccactgaggaagatcttaactgtaaaattcaaatcatacccacttccaagccatgtgtggattaaacgagataagccaactaaagcgattactcagctcagtgcctagtatacaattagtgcttaacaagtactagcgaccgcttggcaaagcaaagcagactgaagcgtgggtttcatttctcatcatgtgataagtgataaaatgctcttaaccaggtcggctcacctggcctttccattcgacctaaataacgtctacttacttgcgtaagggaagagctctggcccaggtcagcaagcatttgtcaggctagagcctccgggtggcgcttctcgccctcagtaaccggttacctccagaaccagggcgccagctccggccatccgcggttaagcgggagctcccattggctaatcgcacactgaaacgcacgccttttcccgcccctgacgctgccgtccaatgcgcgcctctcgactctgctccgccccgccccgcccccgtcgccctgcctccctggcgtatttgcgccattggtggatattccggaccgtgatggtggcgctgcgcgtgcgcactcgctccgagccctgctcccgggagagggagctctcgggtcggggctagggaaggctgaccccgctcggcccgggtgaaagggcggtgacggcactgggtggggccgagctccagggctggctgctgggctgctaagggaactgtgagccgctcagagccgcgcgcctcccgggcggggcggggccggccgtgggagtccgcgcgtgcccgcgccgagctgcctgctccggcggcttcgctgctagctcgcggcgacgtcgggccgattttcccaggatgacagagctgaggcagagggtggcccatgagccggttgcgccacccgaggacaaggtagcggcagcgtcggggtgggcgcggccgggacagcggcgcatccgggaggcctgcgggggacgcgcgcagaggggtcgtcttgttctctgaccctttgtcgcagccgacggcggccccgggcccgggtagcgcgaagggccctcgggtgcccggccttcgcggcgcgcgcgtcaggggtcggcgggtcggggtcccggctcagggtctgactgaagtggctcccccggggcgcaggaaggagcttctcgggagtggcgcacggcctcctgcctcgctgggctggctgcggggactcccctctcccccaactccgtgaggccttcctggaggtgaagatatgcagagccttcttagggaggcggctcctctgagcgcaacttaggctctccgttcccttttacaatgttattattttggggggtgggggaatcaggacaaggccatagcatttgcctcctgggagatgtaaatcccttcttgggcatgaaatcatcggctttgagcaaaggggtgttacccagtgagccagtccgtcatcagcaggtgttggagggcgtcctcccggttgatgggttgtttcctgcaccgtgtgggctctggtgggtaggggaggagagtaggaaggaggccatcttggcggggacagtggcgggggtgacgggtgggggagtggactcctttgggtgaagtgaaagatctgtgtaggggagttaaggaaggtagggattggttttattactgtggaggttgaatggcagtataggactttgtagcagtagttgtgctttccgagatagcagtgatcaggagccctgtgtttgggaaactgatcagacagtgatgtgtagaagggactgagggagcctggaccagactgagggagcctggttcactcgggattgcccatgagtgacctgtagatgttttctttggcccacatattgccttaaaaatcagaaagtttctcctaacaatctaaatttcttgcctgtcttagataattggagggtccaccatcactttgtcacctgctcaatggttggctggagctgaggatcatcggttcccaccaatccctgttgccttacaccaggctcacggcttcccctaatgcagcctgtaactttttgatgactggacgcaacggacattagggagacacccagaaggaagaaagcacaagatttggtgacaggatgtcaacagagcagttacactaggaggaatgtttttggtgaaagataatgagatcatgggttttttttaaacaactttcgtgttattgcagttgacagtggactatccaaagagaactgttcctaccgatttttagaacatatattttggccaggcacagtgctgctcgcctgtaatcctagcttctagggaggctgaggcaggaggatcgcttgagcccaggagtttgagaccctgtctcaaaaaacaaaaacaaaaacatattttggagaacatttagggctggggctgaggatttagcagtcgcttgcagagacaagatactttgaagtctctaatttttcatttggctatcctggttcagcctgaaagaattctgacttaccttgtactactagttggtgagtatgcagatgtttggaggctctgtagctctgtttaagggtgagatcatgcttgatgttagtgggactttgtggacctagaaggtgtgaggagagagagaagaaagaaggcatgatagctggtgggccatgtttttgaaaagctaactatgtacaataattagaatgtcaaaaaacaaccttgggattatgagatgcaacataaagattctaccctccttcccggactcgttggatccatcccccagagataaagtgcgagttgaaccgtcttactttcacatcctgtactttagactgggaggacctgaggagctgtccagctagaggtgcacttatatcacttatacagtgacagaatgcctggggtcatgaggtccacttgtggcgtgttgtttcctaaaagacagctgctatgcactctgttaaaagcctgatgttcattaccgagaacaagacaatcagttcctcaccccattattcagaacttctcaattgtcactgaattgtcatgtatgggattttattattattatttttttagacggagtctctctctgtcgcccaggctggagtgcagtggcacgatctcagctcactgcaacctctgcctcccaggttcaagctagtctcctgcctcagcctcctgagtagctgggactataggcatccgccaccacgctcggctaatttttttttttttttttgagagggagtttcgctcttttgcccaggctggagtgcaatggcatgatgttggctcatcgcaacctctacctcccaggttcaagcaattctcctgcctcagccgcccgagtagctgggactgcaggcgtgtgctaccatgcccggctaatgttgtatttttagtagaggcacggcttctcaatgttggtcaggctggcctcaaactcccaaccttaggtgatcctcccgcctcagcttcccaaagtgctgggattataggcatgagccactgtacctggcgtttttttttttgtatttttagtagagatggggtttcactgtattggccaggctggtcttgaactcctgacttcgtgatctgcccgcctcggtctcccaaagtgctgagactacagacgtgagccaccacacctggccatgtttgggatttttaataagggaacattttaaaaactgtgaaatctattatttgtctttgaatgtatatagtaaacttttgtttgttggtttgtttttttgtttttttttgagacagagtttcgctcttgttgcccaggctggagtgcaatggcacaatctcggctcactgcaacctccacctcccgtgttcaagcaattctcctgccttagcttccccagtacctgggattacaggtgcctgccatcacgactggctaatttttttgtgtttttagtagagacgaggtttcaccatgttggccaggttggtctcgaactcctgacctcaggtgatctacccactttggcctcccaaagtgctgggattacaggtgtgagccaccgtgcccggcccatagtaaacttttaaaaaatcctgatttattctgtttcatagtttgggaaacacctacttccatgactttggctttgccaatattcttgtgttagaacccaaggaaattagaaataataaattttaaggaaatgcattatgaaacaagaactttttaatttcatagtagaagaatccagtgaacaattttcaagtcagtgctttaaaagctctggaataggctgggcgcggtggctcacgcctgtaatcccagcactttgggaggctgaggtgggcagatcacctgaggtcaggagttcgagaccagcctgaccaacggggttttagtagaaaccccgtctctactaaaaatacaaaattagccgggcgtggtggtgcatgcctgtaatcccagctactcaggaggctgaggcaggagaatcgcttgaacttgggaggcagaggttccggtgagccgagattgcgccgttgcactccatccagcctgggcaacaagagccaaacaacgtcttaaaagaaaagaaaagctctggaggctgggcgtggtagctcacgcctgtaatcccagcactttgggaggacgaggcgggtggatcacgaggttaggagatcgagaccatcctggctaacatggtgaaaccccatctctactaaaaatacaaaaaattagccgggcgtggtggtgggcgcctgtagtcccagctactcggaaggctgagaggcaggagaatggcgtgaacctgggaggcggagcttgcagtgagccgagatggcgccactgcacgccagcctgggcgacagagcaagactctgtcttaaaaaaaaaaaaaaaaaaagctctggagtaaacttgaaagattcctcaaaatgttacagttgcttaactgctgtggcaaaactgtcttgtaaatagaaaatcattagtatcaaaataatctggagcatgtttatttataaaagtcagaaggtattttgttatatttagcatctgagaatggaattttcaaagccaattgctaataaaggaaatgttctcctctgggaactgtgcttataattttaaagtcccaaagcacagtatagttgccaaactaagaaacttggagtttaggctttgggaatgatcctcttcctacccaaccatatttttctgatggagcttaggaaagcaaaggatgagatatggtctgaaagattggcatcttaaaatttatgattgagttggcatttcaggagattttgtttcggaagttagcgtataggttctggggttttctgctttacttaattgctgaagtgctatttaaattagagctttacttatttcaaggcttcctttctagatagatgaaacccatatggagaggaaatagtgacatcatttagaaaggggagtttaaatcttaactgaagatagcgtgtaagagcaggggcttgggtcagttacatctaccttgagcctgggctccgccacataaaggctgtgtaactttgagtagatcatggaagttgtggcagcctcagtttgtccatcattaaaatgggggtcataaaattgtatgtgctttacaggatattcatgtggattaaacgtatgtatgggctgacagcagagcttgtcacataatatgttagctatgttgctactgattaaaatagatttttatagaaaaaactttaatattcatcttacacacttgaaaggtgattaaatcttcaagttatatatatttgtagaacctattcatattcattaccttttaaggaaagttttatagaaaggacttagccttctatgacctatcttcggtttattttcaattttaatttttttttttttgagatggagtctcgctgtgccacccaggctagagtgcattgatgtgttcttggctcactgcagcctctgcctcctgggttcaagtgattctcccatctcagcctcccgagtagctgagattacagtcacatacctccacgcccaactaatatttttatttttagtagagacaaagtttcaccatgttggtcaggctggtctcaaactcctgacctcaggtgatccacccgccttggcctcctgaagtgctgggattacaggcgtgagccaccgcgcccggcctctttttggtttattttcttgtggaatttttcagtactccgaatcacaggctttaactgtagaaggaccactgaacactgttgtatgcaattaccttcttttataattaaaaatggttttcaatagactttgagattgaactactcaaataaaatattaaagaactataactacttcaggtataagagaaatgcttaatttttttcaagaaaatttttttatgttgagaaataatttaggaattaaaaaaatcagtaaaccttaactatgattcccaggcttaacagggagaggaggtgaaagattattttctcatataaccaattattttatgtttcttatttttgttgctcaaacagtatgattttattttaaaaactcaattactgcatgatttttgactatttaaaattagtttttccaaaatctatttttaaaaaatgttttgtgtttgcccaggttaacatggtatttcattagaagaatttttatcggccgggcgcggtggctcacgcctgtaatcccagcactttgggaggctgaggcgggcggatcacgaggtcaggacattgagaccatcctggctaagacggcaaaaccccttctctactacaaaaaaaaaaaaaaattagctgggtgtggtggcgcccgtagtcccagctactcaggaggctgaggagaatggcgtgatggcgtgaacccgggaggcggagcttgcagtgagccgagatcccaccactgcactccagccaggaggacagagcgagacttcatctcaaaaaaaaagaatttttatcatctttaaaaaatgttaaattgctctccttggttgttaggactagaagggactttaaaggtgttttttatttttaggaacagggtctcaccttgttgcccaggctggagtgtagtggcacagtcatagctcactacagctttaaactcctgagctcaagccatcctcctacctcagtctcctgagtagctcaggactacaggcctgagccatggcacccggcttgaggtagttattttatagaagaggatgccacagctcagagagtttaagttattagctcaagatgacttagttggttagatacagaatggttcgtattatgaaggtcttctatttatttattttttgagacgaagtttcgctgttgttggcccaggctggagtgtaatggtataatctcagctgaccgcaacctctgcctcctgggttcaagcaattctcctgcctcagcctcctgagtaactgggattacgggcatgccaccacgcccagctaattttgtatttttagtagagatggggtttctccatgttggtcaggctggtctcgaactcctgacctcaggtgatactcccgccttggcctaccaaagtgatgggattacaggcgtgagccaccgcgcctggcctatgaaggtcttctaattcccggttgttgttttttatttttttctcatagaattaatttacagactttaaaagcttctttattgattaacattgatagatatgatacccaaatgttacctatttttcttatttggctacaaaatcaaaaaaatactatataaatctttcaaaatgttaaatgttaaaaaggtctcagagtaaatgtggagactctttgcagaaaaaaatgtatgtgttttatagagaaagttgattagtttcagttttcctggttatcggatgactgtgatttagacatttgtgagcactttcctgggagtggccactctggtatccttgaaaggcactcccggcgcagtgcttgaagaccacaaggcgccttacccaggcagtgggtgagggtgcttggaagaaatgctttccagttaatgactgttagcatgagaaccatttgttctagtaataagcagtcattcagtattcaacgcttctctttagaacattcactgactgtagggtctgctatggacggtgtctgtatttctgagaggggctggtgttatcagtgttcataaggatattattcagaattttattgcctgttttgactccacataatcaattttttccctactgatttaaagaaataatacaatcttttttaaatcaataatatttaagagttttatttttatttatctatttattttttgagatggagtttctctcttgttgcccaggctggagtccaatggcgtgatctcagctcactgcaacctctgcctcccgagttcaagtgattctcctgcctcagcctcccgagtagctgggattacaggcgcccaccatcacacccagctaatttttatatttttagtagagacagggtttcaccatgttggccaggctggtctcaaattcctgacttcaggtgatctgcctgccttggccttctacaatgctgggattacaggcatgagccaccgtacccagccgactgcatatttaaattggtaaggtagaaaatgagcatgagagtctaacagctgatggatatgggaacataatacttgataaaatcattcagaatatgtttgataaacaagaagattgtataaaacctgcactgtcctactaatgtaaagcatttctcctccctcactttattctcaaccttacaactgccagaaattatataatcttgaatatatttgagaaactctttttaaaatgaatcttgtaactaatttcttttttgaatttatatatataaatatatacatacttattttataatagagacagggtcttaaaatgttgaccattgaactcctgggttcaagcgatcttctcgcctcggcctctcaaagggctggtacagcgtgagccaccgtgcccggccattgtaactaatttcacagggcagataatcatcctttaaactgtttgaaaagatttgagtgttactgtttctggttttcacacttttccatcttttctaggatccacgtaggtggaggagattcctctccacagtttgttaagctacattctatgttgttaaggtctcccagcccttctggactggcactagaggctgttgggggtgaaaaagtacagctgtttgtgtgtcatactgcctctggttcagaaaagagacggacactgactcttcactattaattttgccaaagtctccttgaaagaatgctaatttgttcctggcactgggcagggttcctgccttccaagtcttgtcatgtggtggttacttggctggggtaatagtgaggcaccccctccccacccccacgtatggtccccaccgggcagcttcctatgccagtcactgatatttgttctcatgttgtttgccccaacagtagggatggcattgagcccactaagttgactgaccttttgaagaaagttaaactttatggtgttattttgagtaggcagtctgtggtgcagaatttgtaggcagcaaagggtattctgtgaagtttcctttctcccgcctgcctctccccagggacagcctcatgccacactgtggttctcatgagcactgctgtctgtgtggaaggacctgacctgtcctaccaaagtcagacatctttttgatttgttgtctttggcagaagctcctttgtattaaggtctccatagggccagcttggggcttctctgtaaagactttgctgaggttttgagagttcctgggacttgggatttacgggcaacactctctgcccctgggtctctgatgtggagaggatgtctgccattgacaccgaacccctgagtgggcaactctcagagccatatctccacagtccatgcctggctagtcctgtggtttcagtggtctacaagacattcctaggtgcatgcccttcagtccacacaaactgactttgtctcaaatctgaattctctcattctactcttaccaccctccttcagtttctttcttctgcgataaaatcccagatgactcggttactcaggcttgaaatctcctattcctttgttcccgtgcccagggcaggatgcagattctaaccaggtgtgacttggaatccttatctgtttgttgtttgttgtctgtttgttgctcttggagacttcaacatttcaggactgcagtattgtaaatgcctgcagtatcctaaatccgaattccttacctctcctggaatccttatctgtcttttactctttgagatttcccaaatttcaggatttattgcttgccttattgtaaaccctgtgaattgagctccctcctgttaggatttgctctaggtccctcctaatccatcttgttctttgtatctttcaggagttctgaaactgccctaataattattgggggggtggggtggagtgatagaattctggctctttttcataatgcttaaactttaagatcctttgtagtcttctgtctctcatttccttccaattcttgttttaggttcaggggatacatgtgcaggtttggtacacgggcaaattgcacattgctgaggtttggtgtacaaatgattttgtcacctaggtagtgagcatagtactagatgggtagtttttcaatcctcaccagcctcccactctccaccctcaagccctggtgtctcttgttcccctctttgtgtccatgtgtagctcccagttcactctgcaagtgagaacatgtagtgtttggttttctcttcttgcattaatttgcttaggataatgacccctagctgcatccatgttgccacaaaggatatgattttattcttttttatgtagccttctctcttaactggcctttctccctgcttggtgcctctgtgtcatggatcttgattcttgctctttcctacctctgaaatgtgttctttctgtcaccctccctcatttctaccctttttttttttttgagatggagtctcgccctgtcgcccaggctggagtgcagtagcgtgatctcggctcactgcagcctccgcctcccaggttcaagcaattctcctgcctcagcctccctagtagctgggacaacaggtgcttgctaccacacttggctaatttttgtatttttagtagagttgggtttcaccatgttagccaggctggtgtcgaaggcctgacctcaagtgatctgcccgccttggcctcccaaagtgctgagattacagacatgagccaccacacctgacctttctacctatttaagtcttattttttcaaaaattatctcagagcatctctggctagaagagacgtaagcatgtattattaaaaattacagaagtaggtctctacaaaaatattttttaaaatttgctgggcgtggtggtgcacgcctgtagtcccagctacatgggaggctggggcaggaggatcacttgagcccaggagtttgaggctgcagtgtagcccactgcactaccataacctcaaacatttatcatttcttttttgttttttttttgagacggagtctcgctctgtcgcccaggctggagtacagtggcacgatctcggctcactccaagctccgactcccgggttcacgacattctcctgcctcagcctcccgagtagctgggactacaggcacccgccaccatgcccagctaatttgcatatttttagtagagatggggtttcgctatgttagccaggatggtcttgatctcctgacctcgtgatgcgcatgtctcagcttcccaaagtgctgggattacaggcatgagccaccgcgcctggccacatttatcatttctttaaattttttttttttttttgtagaaacaggatcatgctgtgttgctcaggctggtctcgaactcctggcctcaagtgatcctctttcctcagcctcctaaagtgctgggattacacatgagccaccatacccagcctcgagttgatttttgtatatggagagagataggatagggttctagtttcactctttggcatatagatatccagttttcacagcaccatttattgaagaggctgtccttttcccaatgtgtgttcttggttcctttgtggaaaatgagttgactgtaaatgcatagatttatttctgagttctcagttctgttctatttgtctgggtgtctgttttaatttaatttaatttgttaattaattttatttatttttgagatggagttttgctcttgtcacccaggctggagtgcaatggcgccattttggctcactgcaacctctgccctccagattcaagccattctcctgcctcagcctcccaagtaactgggattacaggcatgcaccaccatgcccagcaaatttttgtatttttagtagagacagggtttcaccacactggccaggctggtgtcgaattcctgacctcaggtgatccacatgccttagcctcccaaaatgctgggattacctgggaggctgaggcaggagaatcgcttgaatctgggaggtggaggttgcagtgagccaagatcgcaccactgcactgcagtatggttaaaatgaccgtactacctaaaacaatgtgcagattcacagatattttttaaatcctgaaatctgtatgggatcacaaaagatcccaaatagccaaagtgatcccaagcaaaaagaacaaagctggagacatcacactacctgatttcaaaatgtactgtgaagctatcgcaaccaaaacaacatggtattggcataaaaacagacacacaggctgggcgtggtggctcatgcctgtaatcccagcactttgggaggccaaggtgggtggatcacttgaggccaggagttcgaaaccagcctggccaaaatggtgaaacctcatctttgctaaaagtacaaaaattagcccggtgtgggagcctgcacctgtaatcctagctacttgggtggctgaggctagaacttggatttgctagaattgcattgctagaacttgggaggtggaggctgtaagtgagccgagatcatgccatagcactccagcctaggcaacagagccaagactctgtatcaaaaacaaacaaaaaaagaaatgctactgatttttgtatgttgtttttgtgtcctacaactttagtgaattagtttatcagttccaagagttttttggtgtttttcagtttttctatatgtgagaccatgccatttgcaaagaaggatagtctgacttcttcctttctaatttggatgctctttatttctttctcttgcctaatttccctggctatgatttccaatactatgttgaataagattggtgaaagtggacatccttgtcttctagtgcttagaggaaggctttcagcttttgcctattcagtatgatgttagccttgggtttgtcatatatggcctttattatgttgaggtaggttccttctgtacttaatttattgagagtttttattgtgaaccgttgttgaattttacaagtgctttttcagcatcctttttttttttttttttgagatggagtctcactctattgcccaggctggagtgcagtggcacgatctcagctcgctgcaacctccacctcccgggttcaagcagttctccctgcctcagcctcacgagtagctgggattacaggcgcctgccaccacgcccagctaatttttggtattttttagtagagacagggttttgccatgttggcgaggctggtcttgaactcctgacgtcaggcgatctgcccaccttgggttcccaacgtgctgggattacaggcgtgaaccgctgcacccggccagcatcaattgaaatgatcatatggtttttgtcctttattctgttgatatagcatcatttttattgatgtgccattttcattttgtggctgtatctcaccttattgaaccaagcaggcatttaagttgttttaaggtttttgctattgtaagtaatgctgcagtatggtattcttagataagtgcctttgtttggaactgctgactcaaagggatgtactttgtttaggttttgatacaattaatatattcccttctgcagtaaatttgtagccactctgaatgcctgtctttgtgatctctcctccctgcagagtaatactgagtattcacttgtttcttgattttagcagaggcattttagtctactgattacaatcataaactcaggagttggactccttggtttatagcctagttcaatcattaagttgtgtctgttttctcacctgaacaatagggctgagaatactatcaaccttatagggttgttccgaggcattatcatttctttcctttacaaattgtgtcttagagctcaagtagttgattagggaaagtttctcttcatagaatagatgatgaagtgatataattaaaatacttaaaatttccaatccccaatgaattgatagaatgaggcagtaatcatcaatgctgctaccatcacagaaacaaccaaatactatgtacctcctgatggagaaatcttgtcataaaatcatatttgagcttgatcaagactctagttctaagtgctggtttataggaaattcaagagactgaagatcacatggacctggttgctttagtaaataagtgtgtgtgtgtaaatttctttttccatgtctgtgatttcctggcttataattctgaaagcccttattaaagtctcttgttataactttggggcacttggaaactcagaagcaggcctccaaaaataaaatctccctctctgaccatctcctcctcccctttctcctgctcctttctctccccaaggcaggaatcttctcctgcctttctatcttggagctggccataaaaaattatctggctttccttgtttgattgctataagaccctcatttcaaaaccctatatcctggaggaaagactgctgcacagggaggctaagaagaatctgaacagacaggccttgctgggtttccccacttagtctattagtattagatagtatcctttttgtttagtcacatttctgcatggttgtccatgcaatgtgtgcatctaatgaagtctctataaaaggctttagaggacagggttcagggaactcctgagtagctgaacatgtggaggcttacaggaaggtgaacacatgctgggggggtggtgcaccccagctccactgggacagaagctcttgcactggagactccgaagctcttgcaatggggactcttccagacctctccctatatatctcttcatctggctgtatatttgtatccaatatgcaaatattgtatatttgtatccaatatacaatattgtattgggtggggggtgatggggactccagcttgaaactggtagatcagaaattcttgagcctcagatctacaactgatggaaaagagggggtggtcatgtgggactgagctctcaacctgtggtttctgaagctatctctaggcaaatagtggctgaagtgaattgaattggatggtacccagctactgtccgctgcagaattgattgcttgttgagtgtgtggggagacatccaaaacatttggtcacagaagtcttctgtgattgttgttacagtgtgagaacagagggaaaaaaaacgagtttgagttttaccactttcacacactactctctctgatttcaaaaaacatggaagagtggggagtgatagagatagatatgaaaggtaaaacatatagattaaaagactttaggtgctggttcacttgtgcctgtaattccagcgctctaaaggctgaggtgggaggatggcttgaggccaggagttcaagacaagcctgagcaatagagtgagaccctatctcctaaataaaatatttaaggccgagtgcggtggctcacatccataatcccagcactttgggaggctgaggcaggtgggtcaattgaggtcaggagtttgagaccaccctggccagcatggtgaaaccccatctctactaaaaatagaaaaattagcctggcatgatggtgcatgcctgtaatcccagctgctcgggaggttgaggcaggataatcgcttgaacccaggaggtggaggttgcagtgagccaagatcacgccactgcattccgacctgggtaacagagcaagactccatctaaaaaaaaaaacttaaggcatattaatgatttctggatctaatttggatcctgatccaatcaaactgcaataaagagaaagaattgaagttattgggtaaatttgaatattggatatttaaaataaaggaattgttaattttttaggtgtgatattggcatggtgatgtatattcctcctgtataaaaagcactaaccataaaagaaactgttggtaaattgagcaacattaaaattaagaacttatgtttattgaaccacagtattaagagtgaaaaggaaggccacaggcaatgagaagatatttataacaaatgtatctgatgcagggctaatttctagaatctataaataattacttcaaaataaatgtatataaaaagacaactcagtagaaaaatgggcactttgtttttttattttttttgagacaggttctcactctgttgcccggttggagtgcagtggctcaccaaagcctcaaactgctgggatcaagggatcctcctgcctttgcctccctaatagctggaaatacaggcaaacaccaccatgtctggctaatttttgtatttttttgtagaaacagagtctcactatgttgaccaggctggtcttgaactcctgggctcaagcattcctcctgcctcagcctcccacagtgctggtattattggtgtgagctaccatgcccagccaaaaatgggcacttcagatgatcaataaacatgaaaagatgcctagtatcattagccatctgagaggtgcaaaattaaaaccctcgataagatacaactgcacacccactagattggctaaaattaaaaagaatgaaaactttgacggttggcaagtatatggagcaagaggacctttcatagactgcttgagggagtatagattggcacaatcattctggaaaactgcttgacaatatttactaaagctaaatatacacagactttgtgaccaagcagttccactcttaggtgattgcccagtagaaatctgtacatgtattcactgaaagtcaagttccagaacattcaaagcagtgttctttgtagtagccccaaacttcaaacaatccaaattgtgaataatgctgctaggaacatgagtgtacaaatatctgtttgagtctctgctttcagttctttttctttttcttcttcttcttcttctttttttttttttttttgagacagagtcttgctctgtcatccaggctggagtgctgtgaataatgctgctaggaacatgagtgtacaaatatctgtttgagtctctgctttcagttctttttctttttcttcttcttctttttttttttttttgagacagagtcttgctctgtcatccaggctggagtgcagtggcatgatcttggcttactacaacctctgcctcctgggttcaagcgatttttgtgccttagcctcccgagtagctgggacttcaggactgtgccaccatgctctgctaatttttgtattttttgtagagacagggttttcccatgttggccaggctggtcttgaactgctggcctcaagtgatccgcccaccttgacttctcaaactgctgggatcataggcatgagccaccacgcccccgcctgctttcagttcttttgggtatatacccagaagaactggattgctggatcatatggtaattctgtttaatttttggggaactgccacacttgggtattcttgtattttagaaacttcttggttttaatttcttctgtagatataatctacataaacaactattgggatcctcagtaattcaagaactactttaatgaactgtattatcaaggagagggttgaagcagccattgtcagtgagtgtagaaagtgataacgtgggtgagttgggtgacatactcttttgctctcaagtgacccagtttgggtgatatattatatggcccccctagtaatggagttcatattaggcagatggtcacacttggtaatgaggtcgccttagtgttggtgttcctgtggagctccctgaactcgcaaactttaatcttcctatgatggccaaccttggtggaccaaggtttagaatgaaagaaattgctttggagactacatatctcttttgagatttgacatacttaccaaaatgagtaatgattctgacgttcttccagtgttatttgaaattcaacatgaaacttttcctacatgtttctttgttaaaaatgttgagtaaattttgagacaaaatgtacatttttttcatataaacattgaaaccatcatgttgaggattacatgcattctgtgaagtttgtgtattaacaatccgtgtatgtcttcccaggaaaatgttaactgcagagggtttccaactgtgttggcttgatccggtcctttcccctctggcttgcagaacataacacttcctccctaagtgaggcagcatgaagccccatccagttactactattgtgagtggctcagagttcagcatcacagtttaatgcccagtagtctccttcttaggtctagtgactgtgcaccaaagggttatctgtcctccctttcccctccaactgcatttgtggaagaggaacaggatggagtagggcagaataaccaaaataagctttcctattctgacaaggaaagaatggggagacaagacacagtagtgtcttggctcacctctctcctgagtggaaattggactaagatctctgggcgcgtagatggagtcttttgcccggtagacctcattttagggcgaatgggtagaaaggaaagacccccccccccgcccccgccaccaaatccaagaattgggagagttccattctagcgctcaatattcatgctggaagcttaaattaacccagatggtctgtttggtttatttaaagataaaactagttttgagcctggaggaatagccacgttctctgcaggtgagtctgggaatagagcttgtaatttgcatagttgtttcagtgtacagaccttcaatttctgttacaatccctagttcttgctctcatccactatcccgtttgccagatattggtctggagcttctccagggtttcagagggcagacgctccttcttcctccagagccttcctgaagtacactcttggctgcattttctgttttgtttcatccatcttagctcttcagactattttgtcatccagaaatttgctgaaatctcacatccactggtgatgcctgtcccctgctgtttctaaggccatagtgtccttccttgctgtacttactgacattcatttcattgggatattggggcccaaagcatgggctttatctcctatcttctgcaggaagttccaagttgtgtgttttgctttttgtgtttttttttttttttttttgagacaaagtctcgctctgttgcccaggctagagttcagtggtgtaattatggcttactacagccttgacctcccacactcagtcaaccctcccatctcagcctatggaggatctggagccataggcatgcgccaccatgcccagctattttttaaatttttgtagagatggggtctcactatgttgcctaggctggtctcaaactcctgggctcaagtgatcctcccaccttggcctctcaaaatgttgggattacagacatgaaccactgcgcccatccaattttgagaaactgagctggcattacaacatagaagcaggcagttgcaacacttttgttgacattttttagttttgttttgtgtatgtgatgaaggataaaaatggttcctcttgattgatgacacttgtgaattctgggcttctgctcttggcattaagataggcaggtgctgacaatgaccctgggaattgcttgtgtttagtttgaggtgggtgatgaagcagaggagtcagggaaggaaaccgatgaaagagtcaggagagtttggggtgctaccaaagcctgaatgtttttgagagggaggaagaggtcagtgtcaagtgcaatgggagggtgttgagtagcgtaaggagacgtggtttatcccacccttgtgtgcttcccacggtggcccagatgacagatgaagatgctgtcatcttaggtaataggacctaagtttttttgagcagtaaacctttataaaatacatttgctattttctggatgttgctgttatttatgatttttttagcgtctattcttttatgaaataactaccactttgcgtttataacctgtttctttaaaccattacaacaaaatttcaggcttttataccaaaaaatagtccatgtctgtttaactgcaaatgaccaaaaactaaatataataaacaagctagaagtttatttttcctcacttaaaagaagtctggaggtcagaattctagcagcttcacagtgtgtaggattcaggttttgactctcttgcccttctaccttcctgagtgtgtggcttctatctctagtataggatggctgctagaattccagccatcacttcatacttcagtaaggaggaaggagagagaggtctgctcctttcctgtaaggatactttctgaaaaacgcatgatttctgctcacatgtcattggccagaactaatttgcatgttcttacctaactgcaagggaagctgggaaatgtccctcctgaggggtcatgtgcttggctaagcattgaggtttctattacagtggaagaaaaggagaatggatgttgggagacaactagcagtctctgagaactcttaaaggcctgaagatgcctgttaaaaatggacagatctaagatgcaatacagaggagatgctgggagattataaggatggagagtagatgagaccagttgtggttgctgggagtcttcattagtagtggtaagagctgattcaatgacagccaggcagaaagggaaggggaactgttttgtaggtttggggataggaaagaggggggtcaagtatagtcataagcagctgcctgcacatcagtagtggagcccaggagagcacaggccttgcaggtcctttggtgtgtggtacataaacgtgtggtaaatagagggattaatctgcagaaaactccctgcatctcagtagctctcaagtatgtccaggcccacttctttctttttatttttgtaggggctccctatgttgcccaggctggtctcgaactcctggcctcaggtgatctaccctccataacctaccaaagtgctggaattacaggtgtgagccaccctgtctggccacatttttttttttcttttttctttctttttttgtttctttggtgacagagtcttgccatgttgcccaggttggtcttgaactccttgcctcagcctcctgagtggctgggactatagtggcacaccattgcacccggcagggcacacttttctaaaagtagaggaaaaaccagtctttcagctctgtgtccctcattgtctgatttgtgtcttttgatctctaagagcagtgattgtttttttttgttgttgttgctgttgttttttcttttgagacaaagtctcactctgtcggccaggctggagtgcagtggcatgatcttggctcactgcaacctctaagagcagtaattgttatctaacatgatcttgagctcttacaaaattgtgtggaaatgacctgttgaagagagctagtaatggggctgctttaacaagatgactttggattcaagttattgcagctgcacccccttcctgccattgcaacagaaatatctcctccttagatgctgcaaaatgacttgctggaggtggcacaggtaccagtgtggctgagattgaaacccaggtgtcctactgtctaaagggccttttgaggatgccatggttaggctcttatcagctttatgggggcacttctctctggggaaatgaatgggtcactaatgcagtttagtagacagtcttcaaaataagaggtctttggtgcaacaatatgaaaggataaggttaggaaataggtctaggccatctgttttgttacatgtggaaactgaggctcatggagactggtaggctggccagatgtctgattgcttctggccagtttttttccatgggcttaactctgacggcttaaaaaatgagtctttagtcccttcaactgtaggtttatggtgtcccataaatctgcttccagtgtgagggtggcatgtagatgccctgcaatccctcctcattgctgatcttttggcactttgagtagaatctccccctacaatgcggtttgcaccgtggttgggtcaatatctgtcccctcttgtgattttgggagcgtaaaagccgcctgagctttgttttctcacagggatgtcagccaaacacccagttttctcttgaacagttgctatttctatctcctgtctgttccacagaattctcggtacagagattttttttcagtatgtacgcagtggtctctctgttgaaaacataccactaaggagtaactgttttgaaaacttaccaaggactgtttcttcagaggtactagtctcttctagggactttttttttctttttcttttcttttttttcctggagacagggtcttgctgtggtcacccaagctggagtgcagtggcacgatcatggctcactatagccctgacctcctgggctcaagcgatcctatgaaatggtgccaatttccatttccatgagtactatttgagtatagtatactagttttctccaaacctggcccatcaacctgatgtgagaaaaattgtttctcgtggccgttttattttttatatcatggattattagtgaggttgaatatttaaatatacatgctatttgtatttggtaaatggcttttcttttttgctaattttcctattggcatgttcacatttttcttattgacttgtaaggtttttaaatagttgaagaagttggaccctttgttacatgctgcagatttttctcaatttgtcatttttagtgttgttccatttgaagtattattttggctaaacctatgagtcttcctttgtttctgcttgtgatgacatgcttagaagggccttagtcctcctctccttgcttcccccaccatataggtacttaatttatatgtttagtttatttttagaaatggggtctcactatgttgctcaggctggtctgaaactcctgggttcaagtgatcctcctacctcgacctcgcaaagtgctgggattacaggtgtgagccaccatgcacagccttctcctagtgttttttgttttttgtttttttgagacagaacgtcgctcttttgccgaggctggagtgaagtggcgtgatcttgactcactgcaacctccgccccccgggttcaagtgattctcctgccttagcctcctgagtagctgggattacaggtgcctgccaccacgcctggctaatttttatatttgtagtagagatggggtttctcatgttggtcaggctgttctcgaactcctgaccttagttgatccacccacttcggcctcccaaagtgctaggattacaggtgtgagccactgctcctggccctcctagtatttttatagtttgcttttgacattgaaatctttcatccatctggaatatcttttaatggggtgtgaagtagagatctaaaatgtggtattttcttaaaggatcttaaaaaacgatccatttttcaaagtgctgccactgtgataactgaggagggcttggggcagggtgtggctttgtgttggctggctgctcagcagggctgaccatgcaatgaccagttgtctgcctgtgtccatttctagaaacaggctcactggattatcagaagcattggcccttgttttaccgggatgagcaaacagacctgcaattcagtaacttgacatgttggagtttgaacccaggtgtgctgaatctcagttccatgttctttgcgttacgattctgccttcctagcttcctggtctccgccagtcatttttctcccacgggttggccaaagagcccctaacacagggaagacttgcaagtttctcagggtcagccagcagggccatgaggagtggggcagcccttgccttactttgtacccagtctcggagagaaggggaggtgacaggggccactgggttccatggggcctgcaggccgaaagcaagggcaccctggagcagtgcaggcctgtgtggcacagtgccctcatcccgaggcccaactcagccccagccccagcctctgctgtggagcattcctgacgctcccaccccatttcctcatctctgtctcctctctaggcttctttggaaattgactgtccaaaccctcattaggtgctgtctcctcagcagatggtctctggagtcaggttctttgtcttcgatttctgtagctcccacgtgattcagtaaaggcatgctgattcatcatagggttcctggcagaagggcaaaactatcaggggaacaaagtagccagagatcacatgcggagccaccttctgacttggtcaagaactccttgctggtcagacctggctgttcctagcacgtatggttgtcaggaggttgagttggtactaaatcagctgtgaagattagcaactgcctgggcagtgagaaccaggcctctggtttcgggaggaatttgttgtgcagcaaaataaaatattgccatgttagtgtttatttttagtgttgaaatgccaccttaagttgacagtgttaatgctacattgacatatgatatacttagtatcagtcccaatatttcattaaaaagtacttagaatttataaaactgaaaaagtaaaactgatgcaagtgtaccaagtttggacacattagagaatatcaagtaaaaatcaaatttgatacaaattaaacgcacaacataaattaccattcctgtgtaagttagtagataaaaattaatgtttactaagatgtactaaattacatttacttcatttactacatttaattcaaagttaaaactaagatttaaaatgcagtgatcagtgggcaaggtggtatgtacctgtagtctcagctacttgggaggctgaagtgggaggattgcttaagcccaagagttcgagtccagcttggtaagatagcaggatcccatctcttaaaaaaaaaataaataaaatttttgtagaggtggggtcttgctgtgttgctcaggttggtctcgaactcctgcctcaagcagtccttctgtctgcacctcccaaagtgctgggattttaggcatgagccaccatgcctggcctagactccatgtctttttttttttttttttttttttttttttttgagacggagtttcgctcttgttgctcaggctggagtgcaatggtgtgatcttggctcgccacaacctctgcctcccaggttcaagcaattctcctgcctcagccttctgagtagctgggattacaggtatgtgccaccatgccccgctaattttgtatttttaatagagacagggtttctccatgttggtcaggccagtcttgaactcccgacctcagaagatccgcctgcctcagcctcccaaagtgctgggattataggcgtgagccactgcgcctggtctgactccatggctttttaaaaaaaaaaaaaacaaaaaaacaaaaacaggcaatgatcttttaaaatacgcatcgttggtgacattgatacaagtatatttttgttcaagtttttttttctttttttcctggtgctgataaactaactaggagtaggggagtgatgagagcactgaactgcaactcattcctcttaagctttcatctctaaagaatcccacccttttgtttgataactttaaggatttctttttttggccaagattgcagccttttaattgctagtgtcctatggtttttgtttcaaagacagcatttcctgtttatcttggtgtactttcgtttcatctttagtttggatactctttgaactggcataagaattagtctccaggcaggccaggtacggtggctcacgcctgtaattccagcactttgtggggccaaggcgagtggatcacttgagatcaggagttcgagaccagcctggccaacatggtgaaaccctgtctctactaaaaatacaaaaaattagccaggcatggtggcacacacctgtaatcccagctactcgggaggctgaggcaggagaattgcatgaactcgggaggcggaggttgcagtgagccaagattgcgccattgcactccagcccgggtgacaaagtgagactctgtctctcacacacacgcacacacacatgaattagtctctaggcagaaactttgctttattgattggttttcttcctcctcttgaggattatggaggaaaagaggaagccttttaaatgaggacagcttggtgtgggtaagtctcaaaatataagtggagtaactggaaaagcatgccatttagtatgcatttgtaccacacgggcattgttgctttgtgttttaggttctcatctgtaaaaggtcagcaatactatatctcctgtccctcctgttttgtcccacaataatagccggcttttgtgtagtttagtttacaatattttgtctggattgtcttggggcctttggggctagttttgaactttgatccacaggagtaaatacaacttacagtgtgtcccaataccaccttgcatgcacagatcacttggaaacaaaagtttcaggaagcagtacttactgtttgtgatatattcggaagttttcttttctgtttgagtctatcttatactttttatgtacactttttattaaagtataacatatgtatagagtgcgtacatatcatatttttacaatgacttttcataaagtaagcacatctctgcaatcaagataaagcaaaatggcaccagtcccagggaagcgtctctcctgatgtctcctaatcactgctcccctcaggggagccactagcctgacttctggctccatatcttattttatattttgctagttgtgacccactgaattgatttcaagacccggtaggtctcaacctatagtttaaacaacacaaccttgttttattttcccaataactcttaggaattcctttttatggatgaaaaagctaaggcccagtggtcagatttctcccaagatcgtatagcttgtactgtttgctttttcccatgcatttgagctactcttcttcctgagatgaggaatgacttgctttggaaagacagttgcagccctttttgttttatgtcttgtttatcactctcccttaatgtgtttacaagattgatattcattattaatgtagctttagtgagttcctgatcttaccattcttaagtactgagaatgtttttggtttgtgtttttgtgactgagtcagagacatttgcttttgctttggaggtttgtggcttggaaactttcatgatatttgtctttggcctccccctaataggatgaagctcttcaggtggcatgcaggtatgacaaatgatgactgtgcacagcttcccaccttcattcactgtgctgacctgcagttccttccttgcctgtaggcttttcctatagagagatttctttccaccccgttcccacctcatgtctcccttaggctccagaatacctatgtggagggcctgagtgctaagctgtcctgtcatctgcaagcttgtctgattgtgagattgttgttcccagccagcacctctgggagtagaagtcccatagcccatacctggaaactttttccccagttgccgagcctggaggctctcttgggctgtgaagtgttcactggctgtggtagttcacagccgaggctttcattctaagagccttgaccttctgggttcaccacccttggtagttctctgcctctctgggagagaggcagcttggaaacactgtcagggcaagtgtgtcccaggctgtgttgtaggccatggggatatagcagtgaataaacaaagtctcttccactctgagcattcgtccaaatggaggagatagacaaatgtgcagtcatttcaggtggtagtgatgttagaagaataaaactggtttttcttaataggatgtagccttttgaagtgccagtgtctgaaggagcattccagtgtgctgtccagttggcacaaaggacagatgtctttttgtttgtttgtttgtttgttttatgagacaaggtcttagtctgtcacccaggtgggactgcagtagtgtgatcttggctcactgcagcttccacctcccgggctcaagagatcctcccacctcaacctcccgagtagctgggactacgggtgcgtgccactacactcatttaatttttgcatttttagtagagatgtggtttcaccatgttgcccaggctggtctcaaacttctgagctcaagcgatccgcctgccttggcctcccaaagtgctgggattacaggcatgagccgttgcgctcagctgatttgttccgattctgcttagagcatttcctgttattcaagggaaacaaatggaaacatctatagacctatatgttccatagggcaagattgaaccgcttaggactctaaaagtttttactctgcctacttagtcattatccctggcagcacctttgctgctgtgggaaatgcaactcatttattaccaccctccattttatggtggttccttggaggcactcccccaccccaagtcattttaacctttgggaagggctgaaatgctgtgcttttagtcattagttgcatttatgtaactgtagctctaaggttgtctttcccgcacaaatgccggcaaagccagtattgcaggccttgtagataaaggttgacggatttcattctttttaaaaaattactccttgagcttttaacaggttcaaggcaaggagctctcaaggtaaacaaagatgaataaggcagtccctactttttataatctcaaagtctaaaattatggaaggtgccctcttactgtaaatataactcataaaaaatcatatgggggctttagggaggatgtagctgtctcccttctggcttctgttggcattccttggctgtagccatgtcgatctctgctctgtcttcacattgctctctcctctgtgtctaatctcctgcctctctcgtagggatatacatgattatatttagggcccacatggatactccaggataaatcccttctctcttagcttagtcatatcttttgccatgtaaggtaatactcttcttgccatgtaagataatattcacagtttccagggattaggaagtgaattaattttgttggggggagttttctgcctacccatagacagcaatcacaggaggtttttcttagtggcttctagggatgtgaacagggaggagaaaagactgagagtaaagggggagatgagggaagggtgagatgtaatcaggaacagagagcagcagttttgcttggctggagcaggtggtgtgagggatggactaggatggattgtggaggacctcgaatgggaacagtttgtctaattcattaggcaaaaatgaatgggggagggatgtaatcagagctgtgctttttgaagattaatatggtagtgtatggagaataaatgagagaagggaggaatttgtggagatgccaattaggaggccagcttagtagtgaagggttgatctgcaggcttcagcaagggtgctagctgtgagaatgggaaagaccctaaatgaaagggtctgcatagtgtgagaactgaggaggtgtgtagggtaggggatttggcaacagtgatgcggacagtgttttccatggggcacatttcagggagattagggtcttgaaggaaagcagaaggatgaactagtgtgggtgggaaagatggtggttgtttttgaacccactgagttggaggtatcttgttggcaggttgaaagtttgcactggagcttggaggagaggacataactcgtgttatgggagctggtccacagaagagaggctgaatggcagggtcagctcactaaggggcagtgtggagatacagcctgggggagttactggcatttaggaagtgtgaggaggaagaactgagaagatgtcattggagaggattcagatgcgattaattgtaaatgcaggcagccagtcacattgactaaaaagaaaaaaaggaatccattggctcatgtaacttagaagactaaggtaattctagcttcaggcctggtttaatccaggggctcaaatgtcaccaagctttggtctccctccatctcttggctccccctcatgttggcttcatttttgggttttaaatggtagtagctagatgtagcaagatgttggccagcaggtgaaagtcccatgggaaaggtcatgccttcctcctggtggctccagaagcacaggaaattgctgttacgtgttcttgtcatctctgacctggtcactgtggtcaagggagcacagtgctctgatgaatcaggtctaaattatgtgcctacacttggagtagggggtgggaagagtactccaaagcaaaataaagggaccattactgcacagagtggaacaaagctaggtagtaagacactaaatgttcagggcaccagggatctgggtgggagggggaatggtggtacgcaaagcaaggattggttggatgctactgagatggctgtgaggatgctggagaacagtgtgtggggcttgacagtcagcagttaatctttcaggaaacggttttctgacacagtgtaggctgaagccagactcgggaagtttggggacatatggtaggtgcagactttgtaaaatagtttggaagtaaagagggggagaagtggattggtggctccaggccaaatggagttgaaagaaaaatggttttaggacaaacatctgaagagtggaaaaaaatctgagagaaaggatcatgatggtagaggcagagaaaggaggagttgattggcataggagagcactggaagatgcgggacctggggcctgggcagggaaagagaggccatgtctcagtctgtttgggctactataatgaaacaccatgagctcagtggcttataaacaacagaagtttatttctcattgttttggggtctgggaagtccaagattatggcgccagcagattgagtgtctggtaaggagctgctttctggttcatccagggcttctcactgagtccttatgtggtggaagaaggatttctctgggacctcttttataagggtgctaatcccattaatgaggggttcagcctcatgacctaatcaccttccagtagctccatcttctaataccattgagatgggggttaggatttcagcgtatgaattttggggagacataaatatgcagaccaccgtaggccaagacttcagattggggtaggtggcaggcacttatttcacttctttctgaaggagcttgttactgacagattatcattttaggtcctttagttcaagcttgtctgacccacgacccaacacaaattcgtaaactttcttaaaacattatgagttttttgttttttgtttgtttgcttgttttagcttatcagctatcgttagtgttagtgtattttatatgtggcccaagacagttattcttcttccagtgtgggccagggaagccaaaagattggctcctgctttaggtctttttttttttttttttttttaagacagagttttgctcttggttgcccaggctggagtgcaatggcacagtctcggctcactgcaacttctgcctctcgagatcaagtgattctcttgcctcagcctcttgagtagctgggattacaggcacctgccaccacgcccagctaatttttttgtatttttagtacagacggggtttcaccatgttgtccaggttgattttgagcacgtgacctcaagtgatctacctgccttggcctcccaaagtgctgggattacatgtaggtgtaagccactgggcctggcctaggtcatcattttttaaacaaccctgtaaaatctcaccaagatttttcacttgtttccagattataatggattctgtttgactctggtctccaggttgtcaaatgacatattttcaggatataagactataagtagacttttctattaacagtaaagcttgtgaatcttggtttgatatgtacaaacagagccaccactatgtaccccagtttctggttggagtgacagaatgagaacacagccaatttctgagcagctagcggtttggggacacagtaggaatttaatactgggtgatcgttgtatcttacaaggtgcatcctcaagtagtaataactcatttgtcagagatatatggtggtgttttgcagtgatttgcaaactgtgttctctgctgatacgttaggggttctccaaacaaaatttaaatctgacagtgaagatgaattgagactccttcacgctgttatctcagcacaggtgagggtgaggcacttgatgttaggaaaaccttgctttaacccatgtgtctttgcgatggaacagaaggataagcgagccgctttgaaaatcagattgaattttttttttgtagtaaagttttatcaaacatttaagacctttacaaacttgactaaattttgttattcatttcaaattaatatcagaaatctaatgtgttacattttcttttttttaatatatattttaaattatactttaagttctagggtacatgtgcacaacgtgcaggtttgttacatatgtatacatgtgccatgttggtgtgctgcacccattaactcgtcatttacattaggtatttctcctaatgctttccctccccctccccccaccccacaacaggccccagtgtgtgacataaattttatgtcagataatgtagaacagagaagcatcaaaaaatgactcaatggtcttgataaattcatttgaagatgaaattatgttaaaattttatagttcagtaatttaaaagtatattatagtttttttctttttgttttggatgatttgcatgtaaacaagtgtaaggaatctttgtaaagcatcagaagaaaattttaggtgttttgatgttcattaacagactattagcaagatgtcaaaggaataataatgcctgtgcagatggtaactgctttgttctgttcctcttttcccccaaaacagatttgtaaaaattgtatttgttacattattcacaaaccttttctacaaaatatataccaaactgggttcttttgaaagatttttctagtaatttttaggtcatttccatatatattatgtgcagtttaaaaagcaaaccaaccctagtttgttaaataattaccctgtttttacttaaaaaaaatggggttgtgcacctgtgtaaagtttgtacatcttagcagtataaattactgacacatttttaaaaatgaagtaaaaactcagaatccttgtgattcagtgcccttatgtttttaaaaaagaggaaaaaataatgcaagattcagaatattggagtggttgatatgccttcttcattttagtttttgactggctgctcatatgccgatgatgatgaagctgagctgtttgtgccactgccatttgatgctgcgagaatcacaactgtttcatctgttgctgctgctattaaaaggcagagtagtaactggccactgaattaaatttaaaagaaaggcaggggagagccggcatctctgctgaggatggctttgcttaggtcttttcttagccctgcaactacttaacacttcatatgcttgctgaaggggtaggtctgcccttgactggttgaaccttgttcagaatcctgttcacctggctgttgaggactagaagttgtaggttgctgaggtggtgttgggggttctagccccctcctcacagtagtaggggaaccagagttttggggagccttagcagttttcttcctggttgcaggttggggtggatacagctgttagactgtctgcattgtccagtatagtagccactagccacatgtggccaattaaaccttttcttactgtggctaaatattatatatatcataaaattgataattttaaccattttcaagtgtatggttctatggcattgagtacgttaacattgttttgcaactgtcaccagaacaaacattccagaatattttcatcttccccaaatgaaactctgtacccattaaacaactctcccctctcactcccccagcccctgacaaccaccattctattttctgtctctacgaatttgactactctaggtacctcatgtaagtggaatcatatatttgtccttttgtgtgtggcttatttcacttagcacaatgtcctcaaggttcatccatgtggtagcatgtgtgagaatttccttcctttttaaggctgaataatatgccactgtatatgtatactacattttgttcattcctttgttgatagatacttggattgcttctacttttttgtttattgtgaataaggctgctatgaacatgggtgtacaaatatctctttgagtccctgccctcagttcttttgggtatatacccagaagtggaattgctgagtcatgtggtaattctatatttgattttttgaggaactgccaggctgtttactatagcagctgcattattttacattctgaccaacagtgcacaagggtttcagttttttcacatcttctccagtacttgttattttggtttttcttttttcttttttgaaaatagccactctagtggatgtgaagtgtgtggcagtttaaatttaattaaaaataaatacataaattcacttccttagtctcgctagccacattttaattgttcaataagccacacacagctgtggctctcatattggacagtatagagagaacatttccattattgcagaaagttctatactgacaaaacctggaggtagcagtggacctgaaagggattgatccaagcccagcagagtcccaaggattcaatcaattgataactgacacatacattgagaggcaatccattgataactgacacatactttgtgtaagtagtataatccagtatagacatagttttatattctgcctttttcatgttgctgcacggtgtttatagtagtcttgttaatagctgcacagaaagttgatttaccgtaatttacctaataatttttccttgttagggacataaaaccagtttctccttttcagtactgcagtagagtatgctcatttcccagttgtctccaggcctagcccttctggtttcttcatctgttcattttatcgtcttgctcttttttgtctccttactgttttaaccactctattggacgtacttggcctctaagtaaagtttgactaacgctaactagaaccagaccatgcctgtgttaatatagcctaaaatgccattagctatttttgctgtttgaactgcttgtaccatcttgggtcaagtgcctactccaaaacagtcaaggtgcacattgccttaggctggggtaaatgcctgttcgtgaacctatcactgtggcagaggggcagaattaaaaataagtagactgtacaagctgctgtataccatgaaatagtttatggatttttaggagggaaccaactgcagtgtccagtacctgggggaagatagggagataagaattaagggtcgaacatcccaaaatcaaaaatttgaaattttcaaaatctgaaactttttgagtgccaatgtgatgctcaaaggaaatgctcattggagcattttgaatttaggattttctgattagggatgctcagccagtaagtataatgcaaatattccaaattctgaaaagaactctgaaatgcaaaacacttccggtctcaagcattttggttaaggggtattcaatcgctacctctcaggtttctggcttatgcagggtatatagactcgcatgctgtcaactgattgactaggcaagacttcaggatcagtagttttacggacaatgtcaaaagtgttctgtttagatgtgttacttttgagatgcctgtaagaactttctcgtggagatgtcagtaagtggttggaaatatgaatctgaagcttgggggagaagttggggttggagatacaaatgttggggtcattggcatggaattggtaattaaagccaaggggctggatgatgatacctagggagagagtgtggtaggtccagaactgagcccagggcccattcaacattttgaagtcaggtagacttcaaagtcacaggagactgagaaagagcagccagtcaggtagagtgagaacctgataagtatggtatggaggtagctgagaggagaatgtttcaaggaggaaatggtcaactagatctgacattgccaagatatatgataagatgaaggcaggggaatctgtctgatttggcagcatggaggttgttttatttacttatgtttgaagatgcactttagtctccagagcctagggagatcatactgaggccacattgacttttctttgctggggtaatggatatttgaaagtaatttgatggccaggtactgtggctcatgcttattctcccagcactttgggaggccaaagcgtgaggatcacttgaggccagaagttcgagaccagcctgggcaatgtagagaggctctttccttttaattactggttttcaaaaaaagatttggtgtttcagcacccttcagaggtggccaaagtagttttttttgtttcgtttttatttttatttatttttttgagacagagttttgctcttgttgcccaggctgaagtgcaatggctccatctcagctcaccataacctccacctcccggattcaatcgattctcctgcctcagcctcctgagtatctgggagtacaggcatgggccaccactccctgctaattttgtgtttttagtagagacagggtttctccctgttggtcaggctggtctcgaactcccaacctcaggtgatccacccgcctcggcctcccaaagtgctaggattataggcgtgagccactgcgcctggccagtagtttcttacagttatcattatgaactcataaattttcatatacttgtgtttaaatcactttttgtttattattttaatgctcaaattgtcctatcgttggccattaggaatgtttcttcaaagactttctcattttcaatttaattttttccccaggtatccttagtgatttatcaaaaagagaaagaaactatttagcattgtggctttcataatttctttctttctttttttttttttttttgaagcagagtctagctctgtcgcccaggctggaaagcagtggtgcaaactcggctcactgcagcctctacctcccaggttcaagcagttctcttgcctcagcctcccaagtagctgggattacaggtgcccaccaccacgcctggataatttttgtgtttttagtagagacggagtttcaccatgtcggccaggctggtcttgaactcctgacctcaggtgattgcccaccttggcctcctgaagtgctgggattagaggcacgagccaccgcacccaccccataatttcttctataactaatatgacacatttgggattgagaacactgttaattccatgttcttcaagggagaaacatactagtttctcccttgaatagttacagtctatttgattggtacttgattccatgatggttggttataaaccaggaatactacaaaagtgacaatataatgttccaatatggtaaacagccccagggtgcttgtctgcccacaggagtaggggaggttggggcatgagacactggggacatttgctctcatgtctacttattttgtctaggaatctttgtagaaaacactattgtgaggtgagtgacagtgaagcaggtaccagatggcgatttatgatttaggggctcgtcgcatgtggagcccagcagctgtcctggttctacttcctgacagaggtctggggagcacacttgagcccagttttgagattgcgaatatatttttcttctccatcttactagatcttttggcagtattagacatactccctccttgggagagctttatcttaataaactgaaaaaaaaaaaaaattccttccttccccagtagcgctgaaaactcattttcccttaaatactaaatagagatgcccgactaaggaactgataatagaaggacccgttggactccagtggggcttctgatttttggtgtctttcccctaaccctggaagacaataggaaaacaagtgatgtcatcggaacagagccgttggcagagcctcctggggacctgagtggttttcttgtctctgatagtctctgttctgaattaagtaatggcttgtgatggaggttggtacttcctgcagctatttcatatttatagtcatatgcttgctgttagtaaacagatgcatctactccagaaggaggcttcaatgggcaaggtgggagagagtgttgggagaaaggattcctggtcattccttgtcacaaaaattatgggtttaatgtatgagactggcagtcatgcagaggttgggactcagtacaactgtacgtatttgagttagaaagccttgcattcctagaagctggatttcagacaggatttcctcatcctttctgagacatacagattctgtactttttttggaaacccccgtattgcttaggatacatttggccacaaatgtctaagaagaaggggagataaacagtgggacagctggctgcagccctaaaatgcctcctctagtgctactgagtgcaaaaatgaattgtcagcctacgcgacatgtagcccagctacacctgccacttcagcaaaccctggattctctcagcatcattggctctggctgcctctgcagatgtggttctaggtgccaggccaggtgctgggggtacagtggtgaggaagtcaacatggctcccccacagagatgatggtctcgaggcggagactatgcggtgtgggaagccgtctttttttgtttttttgtttttttgagacagggtcttgctctgtcatctaggctggaatgcagtggcatgatcaggtctcactgcagcctcaatctcctaggcttaggcgatcctcccactttggcctcccaaagttttgggattacaggcatgaaccacggtggggagcactcctaaggaaggacaggggccgctgggacacacaggcagttggggaagatttggagagaaagggaactcttaaaagatcaaggaaaatttgctggaagagaagtgggttttagtagagggtggtttgcagactgtttaagtaggaacacaggagcaaaagtcctaaaggtaagaaagtacaacctgttctagaaactgactctagttcagaatggctgtaagagataaggctggatgagtagataagaccctgatctcaaggggcttgtatgccattttgaagacctgtcatctaggtactggggagctgtggaaggggttcaggatggagagtgacacaatcagaatttctgggaaggtcctcgtgttgcagtggcgagagcgtaggtgggagtggactctaggctgaaggtgaggtagccagttaggctgttgcagttactcaggagggatgatgttggcttgaattaagggaatgacaggtggcataaggagtggatgcaactgaaagctgttttggaggtagcatgaacaagcttggtgacagatctacaagctgagaaaggagccactaagggtgatggccaccttgttctcttgaaaattcggggaaagggtaccatttgctaagataagtcacatagtagaaggaagaggtttgtgggaagagatgatgagcttggttttggacacatggtgagttttaggtgtctgtggagacatctagtagttatttggatttagggtctgtagctcaagaagagacagcagggagcatgagaatgaatggggaaactcagggagagtgggaggcagcagaagaataagagagcttaggaccaaccccaaggaaccctcaaatgcggggacaggctgatgaagaggcagttcctaaggagaaggtcagctaaagatgcctggccagagaggcaggcatcaacccagggggaggtgctgcttggaagccagaggaagagtgtttttcaatagtagcattaaaagctgctgagggattgaacgaggtgaggactgagtccctgctgggtttcgtgacaaagtccttgttgacctgggagagctgcttcagtggaacaggtggggttgaagttgggttgttgtggtttgaggaatgatgcacagccagggaggggacatgaaatgtcgacagctcttcccagaggtttacccatgaagtggggaagaaagtgcattggttggatgagctgtcagaagttgtttgttgagcctgcctagatggttgtaagtagggctgtggtgagggagagagatgagaagatggagagggcaatggagtgagtctctaaggaggtgggaggagaaggcatggcaagcacatggctgactccgagtgtggctgtcctggggacagttgtcctttgccatcagtgttgtgtcctctaccaagtcccctgtggtcctttgtaaatagctttatctggagacagaatggctcacagccagttaggttttaagaagctgaatctgccacattcatgtattttcttgtcctttctctgagtgcagttaacctgttagagatgccggaagtgaagctgtccatctgggtagctgaatacattttctttgaatcccattattgctgtgaggcttttgaaggacagggtatggccatactggggatgactgtgaactcattcagagtggggtcctccttctgtttggtgttttgttctgacaattgaacttgtcaaatggagttagtattagggctaaaagtatttctttgttattcccaacaatatacacacacaaatggatgctgtcacacactggccagatatatgtatatatatgtatatatgtatattttttttcagtaggaactcagatgaaagcctacttggctttttcattgagagggccacctaagtccctgacacttattaaggatgcttattaaggataaacccatctctggtaatttctctcctaggatcctgtgtgagtggggagttgccctccctggcagctggtcacagggcttgatctagaagatggaggccatggtattcagcagaaaagttaggcttagactaatgactttcctccaggagaaagttgataatttgcatataaagcagtgcaaaaaattgtgtaggttatgaagttagtcagtgaaacttgtgaatttgaatgcagtgtcagtgggaaaggcagagttgttggaggcataacccaccagtgccttgaagtctgccttttaatgaaatttccttgaagaagaaagaaaaagagaagaaaagctgaatgatggtactgcttattttctttccctagtttttagttcctcttaggcaaatatgaacagaatattaatatgttttctttagtgtagtccagagctgagtcattatctggtaaagaaatagagtatggagctgggtacggtagctcacgcctgtattcccagcactttgggaggccgaggcaggtggatcacctgaggtcaggagttcaagaccagcctggccaatgtggcaaaaccccatctctactaaaaatataaaaattatctgggcgtgttggcgggcacttgtaatcctagctacttgggaggctgaggcaggagaatcgcttgaacccgggaggtggaggctgcagtgagccaagattgtgccactgcactccagcctggatgacagagcaagactctgtccccccaaaaaaaaaaaaaaaagaaaagaaaaaaaaaaaagaaatggggtatagggtaggataggttccaccggtgtggagcctgacacagtgcccaagggattctctctagccatgggcacagccacacttttttgggtcaaacactgaccatcactactttgggtgtcagagtcttgagaaatatccaggtaggagggtgggcccctggcaccaagtgaagaccgaaagggagcctcagaaggatgctgtccaggaagcctcccaccaggctggcaggaaacccaaacagcagggttttcttcccagagagttgatagtgaaaatgagttccacaaatgctgttctggactgagctaggtccctccccaggaaaagccagaccttaaccacaaggaacatcccctcctgcccactgctccctctggccctccctcactgccttctcttgcttctgttatgttctgatctttgggtcagtgctgggtgtggggaagcttctgggcagttggtggagaagctttctgagcatgagtttctccaaaaatgctaatggctcttaactgagcccctggtacacaggacactccatgtgtccttcatcctaagtgcttctgcctttctctagagggtctgtgtaaaccaaaaggggtggaccctcagaggagcttcccccttcctttaaagcagcactcttgtttcctgtttataccagcactacaacccccttgggaaatggctgaggaactgtgggaggcggtggttgagagagaacctgagagggtctgccccacctggcctctgttcccggccctcgggattgaaagggaaggaaggaggaggggtgcctgggagctgggtggatatgagtcagaagaggcagggcagcctctccctgctgtgctggtctcagtacccaccaggagtgaggcaggagtggatgctggtctggtcctgctgccagggctgctgcaggggcaccagtcaggcacatgagcaggaaagtgggtactatcatatctcagtgtagtctggacactttggtccatcataggtcaagtagaattaattagctcattagttcaacaaatcttggggcacctgctatgttccaggcactgctcagtgcagtggtgaacaggtaactcctggcctctgacacactgccgtgtctgacatgtatatggtgtttttaccatgttcccagtttacactcatgaacatatgcatatgtcttgataatgcccattacaaagcatacatgggaaagaaaagaagaatgaggtaagtagagatgagttctaagatttcctcccacactttggcagatggttcagcttcagagtctactagcatggactgttgctttaatgggtagcttttgtgtttcagacaccaccttacacagttttgagtcggggctaccagtgtgaaagagcttgaagcaaggtaggcaaatgctgtgcccagatcatttattagcacttggccccagcaaggcctgatgctctccttgggaagggtgcccagcttgtctggggtgggtgttttagggtctcgtgcttctgtcctgtgtgctgtggtcaggctactcaggggagtgcggcaggcacctgctgctattcagtactttatagttttcatagcctttcatcggggtcgcattggtcatcccaacaaccttccgagacagggattccttcgccgctgaagaccagaggatggaggcctgtgctgtgtgtcatgagtgtcagagctggccctgggccttgctttcctggactggccactgccttattctgcagaaagtttttcttgacatctccccacctcgctgtgcccagaggagcaaactgatgaatgtgttcagcatgtaccacctttcttgtgggaaggagcatgggttccaggtccctgcctgcttccagaccctctgtggaagctgccgctggcactcagcttccttttccggggtatgagcaactgtgtctccaagcagaatgcctttgtccacggggtggggaggagctggaagactgcaggcctccaggttctttctctcaggtttctgttccctttggcgtccacaggacatcaggagccaggtggctggctgacctgtccccctcctcctctgtgtcttccccaggctgtgcagtttccccgctcacagggatttgccgttggcacctgttcggccctgtctcagcatgtgggagagagtggtctgtaggttggtgttggtttcctgctcagaggatgcttcctcagtaggcccggctgaggcccagggaacctggagttactcacttaaaggtagcaaaaacctagaaagttaatctctttcaggcttgtttgttcagtggttttttgaaaagatcaacaaaattgatagactgctagcaaggctaataaagaagaaaagagagaagaatcaaatagacgcagtaaaaaatgacaaaggggatatcaccaccgatcccacagaaatacaaactaccatcagagagtactataaacacctctacgcaaataaactagaaaatctagaagaaatggataaattcctcgacacatacttcatttcttagttgttcagctcagtccgcctgaggtcttggtaacaatagttgcgatatctttgtaacagttctctatctccttttactactctctgcctctggatacccctcttcacttcaccccttcctacaaggaaggagtcaggtctgacagtgttgcaggatgcagtgctgggctaacggaaggtccagagaggctcttagcacggagctggagctgcctgctcctccctcgcaggacgctgcctgggttccgttcctgtccttccctgcctggggaactagcagcctttgtgagtctccttgacaacaggatggataagttaaaaataaccttgtgccgggctttctgtgtgtgagtgccctctcccctgctgctctggagcgcagtccctgcagcttctagaggctcctgaatgcatctgtgggagcctcagtggggtccaggtgctagcattttgaagccccgaggttttagaggtcaaagccaggtgatcaggcagcatcattaccttgtaactcgcaatgattaccgtaatattactggcaactggtggttgccgatggtgtgtgggtgtcaatgttgaaataaagattggacagctgttgtgaatgctttgtcttcatttagtctccctggagagggacgactctggagaccttactgtgtttcagaaactctggagtggtgtactgggacacagccctgggtgagagtttggttatgtcgcttcaaggaatccccatgggaaggagggtccttaccttatataaggtgaagacgccaaagtacagaggcacttgggtgacttatccagagccacctgtctcgactgtggcagagtagggagcagtctgtgtcttcagaagctgtggctctctcccttggatcctaatgatgaggccgtctttattgggcctttaccaaagccagctgtctcttttttatcagcagtctgcactaggcgaggccctctgtgttgctaatctgttttgtttttctgttttgctcatctgcactagttaaggccctctgtcttgtcacagttgtaaattaatttagaaagagctgtctccctgagggcaggggctgggtttttctttacacacctggacctaattcttctcttcttccatccattagtaagtgttttgctgtgtgccgtgcatggggataatgagaacaagaagttatgttcttgtctttaaggagtttgtcgtcagccaaggagacatttacaaaagtccccgttgtggtcagcgctgagagggagaaggttctagtgttaagagagcaaatcactggggtgtctaacctcgcctgaggtgaaggtgggggttagagcagtctgagagaacatattagtaacacaaagtactcaaatctggagcacataaaccactacaaatcaataaaaaaaggaaggcagaaaactccgtagaaaaactagccagtgatttgacagacacttgacagaagataccaagtggccagtgaacatgtgagacagtcacaattccgtgtattcatcagtcatcagggaagtcagaggacctgggttaatatgagacattgggccacgcattgaacttcccagatcccgtttcttatttgtaaatggggcttctcctgtcccttcccttcctcccagtactgctctgaagcttgcatgggaaaggctcttcagaccttgcagggctatacagatactaagtagtgttgttactctaagtgatttactttctcctccacctcttctcatagcaactattctgaattcccctatgaaagaaaatacttgagtggtaggatggttcctaggattcagaatagcctgtcccttgatactttgggtaaagagcttgctgctggcatggctctggttccctcacccaggctgggagcagggtgacttcctgtgggtcttttgtcacccagggcctggtggcagggaaaggactgaggtgcaccagtcctggctcgagcgttgtctggagtaggctgtctggttcgttgtccacactgactgtgattgacctcctcacagagtgctctagtgaagtccggaaataacactctggacttgggacatgttgacattaacaggtctacaggggcaacagcctcaccacctggcttcccctgagagagcctggtcagtgccattggctgccctagcaggctcagggataacctcctgttaaaaccggtcccagcctcccttttgcattctttggatacaaaggagccatgttctctctcttttggatctgccctctgcggttaagcagatggtacgcggtgcagatgcacacctctcttccagcagagtgtggctggccaccttggcacatgtcacaacagtgtcaggattgctgctagtcctgtcagtcccatcacctgactgtgccaggttcttaggccctgtttggagtctttccccacagatctctcatgacaggcatagacttctcaatggtctactcggcacttttgacctttttctcttctgtatttctgccacttaggagtcagagtcagaagcaaaggtagatggagagactgcatcggacagtgagagccgggcagaatccgcacccctgccagtctctgcagatgataccccggaggtcctcaatagggccctttccaacttgtcttcaaggtaacctggcttaatgatgcaggtgcttgttgggggctttgcaccatgtccaagtgccctggaagagcctgcagagagcccgtggtcttgcagagcaggcccgctgtcttgcctcagcctcccatgccactgctccaggctccattgagtgtaatctagtgcttagcagtggcagtgagcacagtgaccaggaggggagggcaaccaaggctggaaggatctggccccggaagggtgcttcagactggactaggaagtgcagttcaaagaggaagaggggacaggagggatggaggtgggtgaggtcagctgacactgcacagcacaggaaaccagccttgggtttgcgattaatgggcaggctgcttttcactgaggagtccacgtttccagttcagagtttagtttctctcacatcctttgtgaacagttccttaaattctccaggaagaactgggaaacatcttaacctaggtgaatctagtgttaaaacttttggcccttgagaacctggttcttttaacacagctatgtgagtagatcaaaaacacattataagaccccaaagcattatctcagtgttcctatgtgtgcctccaactgtccccttgggagtctgaattgtgcagtggttaagggcgtggactttgcagccagacccttggattcagatcccagctttactgtttgccagctgtttgacctgtgcctccatttcctcatctgtaaaagcgaagtgtgttgaggattgaaggagttaatatatgtaaagtcctcataaaattaccttactcaggccgggtatggtggctcacgcctgtaattccagcactttgggaggccgaggcgggtggatcaggaggtcaggagatcgagaccatggtgaaaccccgtctctactaaaaatacaaaaaaattagctgggtgtggtggcaggcgcctgtagtcccagctactcgggaggctgaggcaagagaatggcatgaacctgggcggagcttgcagtgagctgagattgtgccactgcactccaacctgggctacagaggaaactctgtctcaaaaaaaaaaaaaaaattatgcatatttatggtagctgttattatcattgcataatgttactattattcccataattattcagggcagtgcagtgtaggatcctgctgctggaaaaaaatatttttttcttcagatagtcagctgtagaaaccatccaagtggatacagaagcagagggcactacatttcccttggtttttttgtttgtttgtgttttgcctgataccttctttaagatataagctaggtttattttttgccaagtttggttgtgacttaggcattggtactagtggtcctgctcctgccagcatgtggctggtgcctccgtcacggtgaatctggaaaggactgagctcagggccctcatctcaggaagatccatatcccttgagtttgtgcattggtttttttctgggctcctaactggtgttttctccttcccctgctctctgacctagatggaagaactggtgggtgagaggcatcctgactttggccatgattgcatttttcttcatcatcatttacctgggaccaatggttttgatgataatcgtaagtgccatttcacactattttagttttcccttcagtttttgctgcaggcccggttgtcttaagtgcgaggtgttgggttggttgtgggaattgacgggggtccaggcttctcagaaaacctctgccatagaacatctgtgacttcccacttctcagtagccacctggagggtcattggtgtaggctggttgtttatggttgaagatgtctcagtgtcttttcttttaaaaaactgactttattgcctgtgatcccagcactttgtgaggctgaggtgggcggatcacgaggtcaggagtttgagaccagcctgaccaacatggtgaaaccctgtctctactaaaaatacaaaaattagccacgcgtggtggcacgcgcctgtaatcccagctactcagggggctgaggcaggagaatcccttgaacctgggaggcagaggttgcagtgagccgagatcatgccactgcactccagcctgggtgacagagtgagactccatctcaaaacaaacaaacaaacaaacaaaactgactttattattccaactctgtaaacttttaccctgggcatgtctctatatgactcctggtttcgtttcctgttttcctggggcctcccttctgggcttagagcttttgttaaggaaatcccagtccacagagctgctctgtctgtcttcccactgtcctggacagggtcaggtgaccatcagctgcatgtgagcaaagcatttgactttgaatacttgagacttttcaagtattcagagtcaaaaggagaatggattggttgaatcctgggaggttctagaataaaaagttaaaaaggaggttttagaataaagttaattgagggtcaggcatggcggctcacgcctataatcccagcactttgagaggccaaggcgggaggatcacttgagcccaggagttcgagaccagcctgggaaagaaggtgaaacctcgtctctacttaaaaaaaaaatccttttggctgggtgcggtggctcacgcctgtaatcctagcacttttggaggctgaggcaggtggattgcttgagcccaggagttcaagaccagcctgggcaacacggtgaaaccctgtcttaaaaaaaaaaaagttaattgaaacatcagggtgtgtattttattgtgagtggaaaattggatctactccctgtgacatagagggctgcattgctctgtgggatggtatgagagaggaagaaggagggaagcagaaccactggaggcccgatatttttcttaagtataatgggttttctggaaggctcatgacctgttggtttccatttccaaaaatcataagaattggggtgtcagtgaatgttttgtgtcccgcaggtgatgtgcgttcagattaagtgtttccatgagataatcactattggctacaacgtctaccactcatatgatctgccctggttcaggacgctcagctggtaagctctccggccccacagaggcttttagaatttggatgatgtgctttgtggcaggtacttacagtgacggtgggtatttctatcacttgctatagagataaatgctggagaggcagttatcatgttaggtcatacaaagtttcatgaagaaaatggtatttgagcaataagtgaagaaatgggtaagagaatgttaggagaatgttaagagaaagttaagagaaaaaggcaggagaaaagaggtgattgccacagactcgcacagtgcctttgagacctgagtatttcataggccagactgtgtggttggccttgcaggagtcttatagttacttgaagtctggaatcttcctgagaagaaaccagatgggctgcattctgtgactgtgtttgcctcgctatttggattccttaaactctgcatgatgatcccgtttttctagatcagtatatttttcatgccgtcatatctcagcatcccactagagttgtctggaagttgttaggttctgctgccggctttgcttgttatccttggaacttggtttccttatctctaagacagatggttgagacttactggtttccagactgtggtgtttgagccctacttcatcagaggtgttttgagtgccagagtgggcaggagtgaggctgaatgcatgggatctgggctccgctgggaaagttggctttctccgtttcctgggaaaggattcagctttcttaaagcaaaaagaaaaacctgtaacacatgtctgagacccctttctgatctgaaactctgctttattggccgtagtattctcaggtggtgacttttgagcagagcactgcaccatgctgagaggacctggggcaaatgtggaccttctcaccccactgtgcagggatacaggggttgaagccatgacttagccggctggagagcagtggtttttgccccagcaacctggtcactgtcaaggaagccgatgtgctcagatgtaggctgggcacccccttcctgaggtgtttcctgtcacccaacagacaggctgcctcccagcctccagatggaattgggattgccacctggcttaagatgcaggtcccttttgtggctgttctttagctggaaagcagtgttttgcattttgttaacatactcaggaggcctgactcctggctgtggtcactttacaaagaaagttttttccatgtaacagaaaagaaacccaatatgggagtttttgtacttcataatttaaaaaaaagaatgggaaagaaaagctctccactttcttctctatctcaggatccttgctgggggtttgcagtgatggctgcatggtgccatactcagcagtactgtggaggctgcaagggatggcttctcttctcatgaacgccagttgaggagagagaatacacaagtgaagagttaacgctaatggaaggtctgtttgtcagagccaggcttcagagaggcagatgcatcattaattgcttagtcagataatcacatattacttgctatagaaataaatgcaggggaggcagatgtcatgttaggtcatgcaaagttttatgaataaaatggcatttgagcaaggagtgaagaaatggagaagcaaagagaatgtcaggagcaggaaaaaggcaggagaacagcagacaggtgtggcaaagccggaagaaaccattttgataggagtgaaggagttcctgttgggaagagtggaaacgagactggggaagcaggatgaggcgtgtttttgaaggtcatatggttcaaggatccctcagttaggtatgggaatgctacaaaaggggcaaaaacggagtctcaagtttgggagaaatggagagtgaatgaaagctgctgtctgtttctagataaatttctcacctacggtgtcaccagagagcaggaaaccatggtctgcctgttgctctgtgagctgtcccgggggactcaagggtggggggtattctgctgccctctgtcccttcctctgggatgtctgactgccttgctgtgaaggcaagggtgctccccacggcaatgacctgtcttcatttacaggtactttctcctgtgtgtaaactatttcttctatggtgagacagtgacggattacttcttcaccctggtccagagagaagagcctttgcggattctcagtaaataccaccggttcatttcctttactctctatctaataggtatgcattaagcagttcaccatttcttgtgtctgtattgtttttgtatgtctgtcaggtaggaattggggaatttcttggttagtatacagttttgtgacattaactgtgaccatgcaggggagcagagctgatgctctatgttaagctgtagcagctgttaccttttttttttttttttttgagccagggtctcactctgtcacccaggccagagtgcagtggcaccatctcggctgactgcaacctccacctcccaagttgaagcgatcctcccacctcaggtcccgaagtagctgggactacaggtgcctgctaccatgcccagctaatttttgtatttttagtagagaccgagtttcgccatgttggccaggctggttccgaactcccgagtttaacttatccgcctgccttggcctcccaaagtgctgggattacaggtgtgagccaccacgcccggccttgtaggagctcttttaagagaagcagagtgtaggggcaggactgtggcctgtgccacctgcccctgtgtttcagccaccattgaggaacagcacagcatggtcctgtcctgactctcctgttggcaaagattctgcagtgggaccgaaacaaaaatcatctaggaacttaccatctttaggggagtcattttaggagaccgccttgggtgacattgtagcatggtggaaattttactggatttgggcgtagactctgcaacctcagggggagctaggaacataatatttctgagtctcagctcttttgtaatctagagctaaaactgcagggttactgtgaggattaaatcaaatacattaaaacttcacaaacattaaagcgttatattagtatacattcaggtaaggccacgtactaattctaataatgctgatggtttttcatagctaccttcaaagctagtttgaggtgcacgaaaaatttgttctgacctcaatgtcaatctgacctatttttgatcagcttgatagcaatacttctgtgaatgacacctgactattaaaatataaaatctgcaaaggggtctgctgccattgaggatattcagagagtatgctgcagaccccgaaagcagccttccacagtgggaggtaaggggtctggaaaagcgacatgcttatttctgggcagaactgcttttgaggatctccgcatgtttatggataaaggttcctttccttcctggagaaggggtctgcggacatgttgtgctaccatctaggtcactgtgagagagataaaaaggtggtcttgaccctataccatgtggatccctcttctcccagccctatgaatactaggacaggtattggcaaactttttttttttttttaaggggaagcaagtttattaagaaagtaaaggaataaaagaatggcccttagagcagccccgagggctgctggttgcccatttttatggttatttcttgattatatgctaaacaaagggtggattattcatgtttcctttttttagatcatatagggtaatttcctgatgttgccatggcatttgtaaactgccatgtcactgattggagtgtagcaattaggacaagcagaggtcattctcattgctatcttgattttggaggggtttggccagcttctttactgcagttgttttctcagcaaggtctttatgacctgtatcttgtgtgacctcctatctcatcctgtgacttagaatacctaaccgtctgggaatgcagaccctgtagatctcagcctcattttacccagctcctattcaggatggagttgctctagctcaaatgcctctgacatttcccccatcacttttataagagaacccttaatcctaagggttgcagagggacgaagatccatcctctgtaacttcttcaggctgattaggggcaatgatattcctgcctacctatcgaggtctcttgtattcagggtagagaggagctcagtcagaaagtgtcagtatggttagggctattcacagctcggacacaaagtgatatctggaagattttgtaagtgtttaagagaacattgagtaagcttatcctgcattcctacacaaatagtacaactattccatatcagtaaagcaaaataagcaaaactatcccaagtaaactaaagaaggctttccatgaactgggtaattgttggaaccaagctgatacggggtcggtagctgattgcaatatgttcccagaattagaatactgattcagatttttacatcaccaatccctcttgtttcttctgagctgcagccagagatcactggttggttcacaggaacaagcagtctaaattgcagaaaaaaaccaaagtcagccaatcagtgctgcagtctatttcctttgggttgggggtctcctcagtattgtccctttggggttcaccagaaagatgttaccagaaaggggtccagacccggaccccaagagagtgttattggatctcatacaagaaggagtttggggcgagtctgtggaggaaagtgaaagcaagtctattaagaaagtaaaggaataaaagaattgctactctgtaggcacaacaggcagcaaactttttattaaagttccaaacagtaaatattttaggctttggggaccatagggtctcttgcagttacagtcatgcatcgtttaaccatgggctatgttctcggaaatgcattgttgtcattttgtcattgtgcaaacattgtagagtgtacttatgcagacctagatggtatagcctcctacacacctaggctataatgtgtagtctatttctcttagagtacaaacctgtacagcatgttaccttactaaataaatactgtaggcaattataacacaatggtaagtatttgtgtatctaaacatagaaaaggtactatatggtaattagtaaatcttatggtattataatctatgggtattataaccttagggaactgttgttgtgtatgtggtgtgttgttgacgagaacctcgttgttcagagcatgactgtactcagttctgctgagttgtagcttgaaagcagccatagacaatatgtaaacaaatggacataactgtgtttgaataaaactttatttataaaaacaagcagctggcctgaccactgtttgctggcccatgttctaggaataaaacattcctatctgatgaaccatgttctaagtttagtgtggtctgcatgattataaaatattgccttccttttactgtttgggaggagttattttttccttgtgactgtttatctgggtaatgtttttctcccctgggctttgacattgtgcactggttagctgctgggaataaattagccaaagaaccacttaacatagctaaaggagggcaaagataaatgcagaacataattcatttttcttttctcctcccacctcaaactaggattctgcatgtttgtactgagtctggtcaagaagcattatcgactgcagttctacatggtaaaggaaatgcatgcgtgtgtgtcagaattcttgatttaaatgaagtttttcaggaactcaacaagcctttcatgctttctgtgacaaatcaaaactcaggaacatggtctgatatgtatgcatctagagcatgaaggaagaatgcccatttaggtttaatggctctacgttgacttagacccagtcactgttacttacaccttaagcagcctctccactaggaccctgaggtgggctccagagaaggcacaagctgaagcttcagacactgcccacagatgtcctgtctggtacatcacttgctaccacttattccctgactcactagagaacagctcctctctgagtgctccaggtgctcaataactactaagaaaatgaaaaatacccaggctttcagagcatgggagagctcactcactagtgggctgtgggggacaaagtattactctcagaagcctgatcttacctgttcactttcaataagtcagatacaaaagcagatatttttcctacctgcttctcagcagttttctatttggtattgattgttctttgaagttactttcaaggtaaactggtaagtagtgtttatttttcttttttttgcagtttggctggacccatgtgacattgctgattgttgtaacacagtcacatcttgttatccacaacctatttgaaggaatgatctggtgagaattgggagttggattttcccttttattttgtgagtgtttctcgtgtacagatacccccctctaagccagtggccctcaccttgagccacatcagaatcctctgcagggttcattatagcacagattgctggaccccacccctgactttttgattcattagatctggggtaggcttgagaatttgaatttctagtacattcctgggtggtgcttatattgctggacaggacctatgctctgagaaccactgttctagactaataggtacaggaatatttaaagactcaaagacaatgcaacatgtatggcaacagatttgaaaacctagaggaaatattcatgatttcctgacaaaatatatactaaaagtcatgaagaagaaaacgtgaatagatcagtaactgtaaatgagctttgaaaattatgtaagattccatatctggaaagagaaacaggaccaaatgggttaacagctgagttttatctaacctttataccaaagccaatgaggagagagaagcaggaatgataaacccatttctgctacgattatagataaatcattctaaataaaatactagcaaatagaatctggcagtgtgtcaagggaataatatgcaaataccgagtggattttattccaaaaatgcagtggtttcatgtatcagcattgatagaaatcactggccaactgaagcagctaggtgatcttagtgaaaaggttaaagggcgggcgcggtggctcacgcctgtaacccaacacttttggaggccaaggtaggcggatcacgaggtcaggagttgaagaccggcctgggcaacatagtgaaatccccgtctctactaaaaatacaaaaaaatagctggtgtggtggcgtggcaggtgcctgtaatcctagctattccggaggctgaggcaggagaatcacttaacctgggggtggaggttgcagtgagccgagattgtgtcactgcactccagcctgggcaacagagactctgtctcaaaaacaaaaacagaaacaaacaaacaaacctgtaatcaaagaactttttaaaaagtgtcagtgtcagggagtggagggtgaggagagagagaacaagtgtggaaaccacctctttcatagtgaggatgactggatcagcaggggagtgggcagaggggaaatctagctgtgcgtgttggggtttcacactcaaatacagtcctggggaaagatagggccaactagagctagtaataaacagcaagaaaagtcagtaaataatgaaagagtcattaaagcatactatttagaattggggaggtaaccactagaaaaataaaaattagaaacgattagaagtggttatttttgggaatggagatagggatgggagaaagaaggaaaactttttgttccttttacaattaaatttctctcattgtttacgtatatttctttatcatgaaaaaaggacagatgaccttttagtttgcaacctccacttattcagtagtcattcagtaaacacttgaatatgtactctgtgctaggtactaggtatgacttttttggtattttttatgtttttaacttactccttaatgggttaccagaattttatgggtgattttggtgctggaatttaagaatggcactattttgtgtacttttgaggtactgtcaccttgcttgagttgatccttactttggttcatttctaggttcattgtccccatatcttgtgtgatctgtaatgacatcatggcctatatgtttggctttttctttggtcggaccccactcatcaaggtaaatggattaccctaatgtgaaataccactgtgaggggagggtggtgctctcaatgtgagtagatcagcctggcagacagaagaaatctagctgtgttgtattgtggccatgtcttcatgtcttcctggagaaaggccaaaggaaaacactgacaactgattaaaaaaaaaaaaagataataaagaaaataggctgggcgtggtgggtcatgcctgtaatcctagcactatgggatgctgaggcaggaggattgcttgaggccaggtgttcaaaagcagcctggggaacttagtgaggccttgcctttactaaaacatttaaaaattagccaggcatggtggtagcatgcacctgtagtcccagctccttgggaggctgagatgggaggatctcttgagcccaggaggttgaggcttcaaggagctgtgatagtgccactatactccagcctgggtgatggggcaagatcgtgtcttgaaaaaagaaaggaaaatatttttacagatttatataatcttttttggggacacattttttgggactttgatctggatttgagtgtagtcacttaattagtatatcgttttctaatataaaactattcgaatgactgattgaaacagaaagggaaccaaagggaggaggatataagatagggaacaaggaaaccatatttgggggagctttaaaaggtgacatggttaagagaatggggttttatgaaagaaaggttcttaacaagtaatcattgttcgcaaagctatagttatcaaaacaccctttgctgagaacttgctctctgtccacagctgtccccgaagaagacctgggaaggcttcattgggggcttctttgctactgtggtgtttggccttctggtaggtggtggctttcagctgtgtaagggattgggtggacagaggcctcataccaccttccaaggcctgtccagagctggagagtgtctttggaggccaggactgtcctgctgaatggcaaccttgccctgaagagggccactggccatgccagccatccaccagctttcaggcagggtgctagcagttggagagcaccttctatgccctctcgcgcccaggcatggtgacatcagcaggtagccttcttgtcaggcatttgatgttccaaggtcagggtgagtgcacccaagggaagatgagatacacagcttttctcctatgtgtgccttgcccagaggtgggtgattttcctgccctttccagagcaccattctctgcttctgacccttgggccagtcctccttcttcagcactgtctggctgcccttcagtgctcaccgcccagctttgttgctttccagccttgttcctcctgagatctgcctctcactgtgccccttccccatggcctctctccagttatcactgacttcagagatcttgaggaaagtggtcctagctccccaaatggggagagtcttcttgtagttctttgccccagtcccttcaggttttcccggattctttcggggcctgggtgtttgggttcctgtatgtaaccttggtgggtcatgagcctctttttttttttttaattgaggtaaaatatgtatggtaaaacatgaacctctgagcacatagctcgcagttagcagggtactaggcaccctcaggaacatggccaaaccaggtgcctgtgtctgggctggatggttggaacttacttccttgccggtctctctgttattcctcctcagctgtcctatgtgatgtccgggtacagatgctttgtctgccctgtggagtacaacaatgacaccaacagcttcactgtggactgtgagccctcggacctgtttcgcctgcaggagtacaacattcctggggtgatccagtcagtcattggctgggtatgtgccactcacagggggtgagcggcctccatggacagtggctacaaagagagatccccctccatcacctgccctctgaaaaaagctagcttcctccttcccaaagctgtaagccccaggatgaaggagaattgctcacgccaggtcagggtatgggcaggacagctttcccccaacatcagattgtttagaccagtggttttcaaagtgtgttctgtggatccctggagggccctgggatccttttagttgcgggggtagggtgggggggtctgtgaggtcacaactgtttcataattagactatgacattattttcctttttcaatgtgttgacatttgctgtgatacggcgcaaaagcagcagtggttaaaactgcgttaaggcagtgggttcctcatgccacacactcacagtacaaacaggccagttctaatgaatgtctatgaaatagtaaagttactaattttgttaaatcttgacctttgtacacacacctttttaacactctctactgaaatggaaagtatgtgtaaaacatttctgctaagtactgtagtacagtgcttgcctaaagggaaagcatgtgtgcagttgtttgagttgtgagctaaattagctgctttttttttagaaaagaaagtaaattttacttggaaagaaccaacaaattataatttttcagacttgggtatttggcagacatttttcttgaaaaggatgaagtgagcctatcactttaaagaaaacaactgaggctaggcacagtggctcacacctgaaatcccagcactttggaaggccgaggcaggcagatctcttgaggtcaggagttccagaccagcctgggtaacatggcgaaaccccgtctttactaaaaatacaaaaaaatatagctggggatggtggcgtgtgcctgtaatcccagctaccagctactcaggaggttgagttgcttgaacccaggaggcggaggatgcagtgagccaagatcgcaccactgcactccagcctgggtgacagagtgagactgtctcaaaaaaaaaaaaaaaaagaaaagaaaaatgactgacagtaattgttaccaaggataaaatttggctttcaaatgaaaattagaattttggaaagcttaacctgccactgtgaacttgacagcttcctaatacttaaaagccttttctgatgaggtctgtgatgattcttaacgtacgtgtgtgtgtgtgtgtgtgtgtgtgttgatcacatgagaaaaaacacaaacatatttgacacggtataatgaaatgtgtctacatttggaagatttacataactcagtgaaccattattttctaaatggctgatgcatggtgttatatagtcatgcatgggtaaaagatccgttcaagtataagatagaccaatggattttaatgtaagagagaacaaagtccattgatagaattctagattccatatcacacctaatattcaagaaatgactacttgtcaagctctggtgtagtgtcagagaatacccaaaaccatctgaggctacgactaaaatactcttttcaactatgtatctgcgtacggctggattttctttatatacttccaccaaaacagcatgttgcaacagattgaatgcagaatattttaatgttttccattaacttagatattagaaatttacaaaatgggaaaaattcactcctcttattgatttaaaacctacatgtatataattagtttcataaagagttacgaggttggatgtcttggtctgtctagtgttgatagaacacttggggctgggtaatttacaaagaaaagaggtttacttagcttctttctgcaggctgagaagtgtgagaagtgtggcattggctgctgcctggcttctggtgagggctttttatgctgcattgtaacatggcggagaaggtcaaaggtggaagcagacacatgcaaagaggcaaaaccaggggcttcatcacttcataacaacccattccctcgggatgccagtgctaatctagtctcttgacagaactcactactaggagaaaggcaccaagccattcatgagggatttgcccctgtgacccaaacacctcccactaggcatcacctcccagtgaggccacaatgaggatcaaatttcaacatgagttgacaactcaaaccgtaacactgggcatgtatgcacctaaacttttacttcatttactcttctcagaaaacggtccggatgtaccccttccagattcacagcatcgctctctccacctttgcctcgctcattggcccctttggaggattcttcgcaagtggattcaaacgagcctttaaaatcaaagtaggaaaaccgtcttacgttcctctcatctcactccctcacccatcttctgcctttctcccccttccctgccccctccaaaatactaggctgtacaccctggcatttaatgtgtgatcttgacccatgcactgaatttaggtgagttaattaataacaatattttcaggaaaatgcaatcgttgtttttcagtttatttgttaatatatctttcttcaaaagaacattttgggccaggcagtggctcatgtctgtaaccccagcactttaagaggccaaggcgggaggatcacttgaggctaggagttagaaagtagcctgagcaacatagcaagactcctgtctttattaagtaaatgaaataagaacattttgtaatgcaataaaattgtgtcctaatatagcctcaccattagatttcatacttctcaccttctattgccctcagctactcagcacagaagcctgacattggggtgggaccattaggctgggattggttagtggctgagcccaagttcacccatccttcccctgcctctaacaggactttgccaataccattcctggccatggaggcatcatggatcgctttgactgccagtatctgatggccacctttgtcaatgtatacatcgccagttttatcaggtatagtacctttccatctgaaccaagttggtggatttttaagtacggtgcaattctagaattttagcggcatctaagttccagtgaaaagcatcccaaataatgcagttttcagttgtttctgcttacagattttctgaggcctcctgtcatctgttaatagataactctctgatccagagatcagagcagccactcagataatcaggccctggaagcttccgggccctagctcagtgctgtttcttcacattctgttccagaggccctaacccaagcaaactgattcagcagttcctgactttacggccagatcagcagctccacatcttcaacacgctgcggtctcatctgatcgacaaagggatgctgacatccaccacagaggacgagtaggggccacccagggccaggagaacaggaacagaactgagcaggggcaggtctccaaggcaagcccagctggtgtgacttagacaatgacgaggcttcaactcactgtcttttttttttttttttggagggtattttttatttgtgggttcaaaaaatctgtatatacagtctatgtgtttagaatttgtgttgtaagtaaactacagctttgagttggaaagaagtcacgggttgtaaaaccatttggatttttttaaaacaaaagtattaataatctggaagacagtgttgcccaggtcaggagtgttttcttggtggttccagcccccatcaattgaactgtttctgggctcagtcagacacagacattcatctgtgtctgaccaaatcaggggacttccccacctgtggtgggaggcacagcttagatgttttgtacacctggtcttttctagaaatccctgcttggagctgcagaagggttgccttctgtaggtcggaggaatggaggcttactaaccaggtaagccttctatgcatccacaccaaaatcctgcagaatgtaagtaagctctgctttataagatgggttcaccttcatcgcagactgaaagtttcagtttttatttttttcagaaagcacgaaaaattatttataatagtctggagaaaaaacacactgtaatatttcaagtgtatgcagtagaatgtactgtaactgagccctttcccacatgtctaggctccaatgtctcctgtaggtccacctaactgtgtgttttcagggacaatgccatccatgtttgtgctgtagacttgctgctgctgaatcctttctggggactttctcatcgggcagggagcagagggcttctcgttcatgcaccctttgcctgaacacccatgtagctgctgtgttgtgtatatattactcttaagaggagtgtgtgtgtctgtgtttgttttaaaagtcacttatttcttacagtgatttcaattgcaccatgacttcttcactaaaaccacaaagtcctgcttaaaactatggaaaacctaacctgattagagccttgactattttgaagattaaatgcacactttttatataatgtgaccagtttaaatgtagtttgtattgtactgggggacctttcgttgttgttgtttgcttaaactgtgattttttttcccctccctaatttcaggggtgagattgactttgggaagacagattagttctttgtcaggccaacaagtgatggagtgcgggagagagaacttggcacccaaatatatcaaactattccgtgccgtggatgttttcattgccaacgagggtgtaatgatttgcttctgcaccttggtctagtgctggtttgtggtgtttttgtttgtaaattagcctcactgcctccctgaaagtgcacagtcagcccaggtctctagagtgtccagcagaggatggagccctcgggatgtttcagctcacacatccttgagtgacttcccatatgtgtgtggggctgaagcggcttctttccgctgaacttttatttccatttcagcctcgtggcttctcttattcaggtccaaggccccttaaaaacaaaacatattatcgcaagggctttcatttcagtattggctgtgtcactggcaggatgcatcactctccagggcctctttttcggagctactcccaattccactcttctgtgattctggctgagcaagttcatgccggtagaggctcattaagtgaggtcctgggcaccccccaaacaggaagtgttttcaggcccttacatgcttatccttaaggtgagtaggtatctcagcagcacacccgaacagtaaaggtgatcaataacgaaactgtagttttcagattgaagaatgaacctggatcaccaaactagataccgaaagggctcctcatttgtctcttttgtcccattgtgggcatatggtgggctccttgagaggagggagtctcagctggggcctggctgcagagacctgctcttgaatagggctgcctttgggatcagggagccgagcatactgggcaaggctcatcatgttcctttgtggaagtggttacttggtgggggtggggtggggaaggggggtctaggaagccgaagctgagtgcgcactagagctgctagcaggcaggccagagggtcagcttgtgttttattttctgatttctcctgcatgctttctggagatgaggattttttgtcaggtagctaggagagcactgccaccttgtgtccatatagcacaatgtttctctttcctattcacagacaagattcaagaaaccatttttacgtgtgtacattcaaatcttcatgaatggcatcacttgctttagacccattttttttttattggtcagaaataaaatgtgactgcaactgtgtgccctcccttgtcgtgaattccctgtttatcacttccatgcatggttttatgcttctcatttgtttatgtattcatgaatactgcatagtcctgattcagagacttttgctttgctttccaacttgtatccctacattctcacaacagccttcttacctcgggtgagagtcatgagcaccttaccaggcagggagcttccccaggatagtgtggtggagtcaggactcactccatcctgcactttacccacaggacacctggagggtcccccagccctgcttgcttttgtgaacgtcgtgtgagtacaccgaggtgttgcagctttccttccctctagctcaggaggcctggcctgagccaggttggagcttaaattgctgttggctcctgcctggtggaacaagggggtcatagaaaccagggctgatgggcaccccccagcccctgggagctctgctcatgaccgctcacagggtaccgagtctttgccttttgtgtgtgcgcatgctgccctcttaactgcttttagtattcagaaaggttccatttatgttttactcctgaaagtgaaaccctcttaggcaacttgtttcatattctgggcattttagtagctacagtattttgcatttaaaatgtaattactcttagtattgtacagccctataatgtatgagaactagtttcacatcctttgaaactaatctctttcattggggaggatacaacttttgactttacacaggtggactttgaatccatttttatagaatttttttccactgtaacttgacctatattatgcaagaaaatcccaaaaatatgttttaagggagactacacagaccttgtgatttggtctgagctagttgctgagttgactggagccttatttgaatggatctttgagttgagatcttcacactgtcagtgagcccttggctcagcccttgtcacctgtttgtatggggaccatgtttcccaaagctcaggttcatctccactattgacagagtcgggtagtgggagagtataagtgacttgagacagagtgtccttgctcagaaaactgtgaagcaggggtcttgttagttacaaagccagtcctagttgcatgtccaagggggtagattttcatcaccctactaaatgtggtatgtcactgctgaagccttttcctgttttagtaatatcttaggcactattgtcttttgtcttccagagtaacatatctgggcccacctttcttgcacactgtgattatgtgctaagaaaagggtggagttgggaggacaatttcacttgaacaggtttctgttcttctgaggtcagggtggggaggatgtccaggtgacttttatggacacattgcaagacagtaagccgcggatggactctcacttgtgctttggaacactggactccaaagagcaggtggaacaaactctggcctgaagatgatggctaatactcaggcagagccccgtattcttccctgacttggtcaaaacaaacttccttttcccttgatcaccctgcacgcagctgcccagcttccagtttttaaagagatgaacagctctcacttcctgactcagtttctcttgttgggtgggggccttgtgccacaacctgcatggggtgctagggtttaaaccaagtggtcacgaaggattcttatctcagggctctgcctggcccaccttctcttgggcctggactctccttatccacatccctgcagaaggtgggccctattctcagaagagtcctggctgctgttgccatctgaatgcgcccttccctttcaggttgaccagcagtggccttacctggcctctcaggtggatggaggctgttctcatctggggctgtctcttgattaaggctgtcacctgtttgtatagggaccatgtttcccaacgcactttgagtgcagtttaggaggtatcctttggatgctgaagtgttgggattttgaggacatgcggatgatttatgagaatagaggggcagagtttgtgaagtctagggttttttgtccagtgggtttcaaatttgttggctgtttaaagaccctgtctcctcccccaccctccccttccttttcccatcaaatgcctacctactgaggcgccttctctttttattcttgagccaatgagatatcagtgtgtttattaataaggattgcaatagtatagtgcttaatatgtgccaggcatagtgctaagggtttacatacgttatcccttttaatccagaaaacagcctttgattaggtattgttgtctccattttatagatgaggaaactgaggcagtatgactgaggccgagagcagtggttaagacagactttgggatcaaatcaccctaggtgcgggcaggtttctaggctgctctaagcttctaccttgaaggcagttgggtctgataatagtaccttcttcctggggtggttgtgaggatataacgaggtaatgcatgtaagcatttagtaccatgcctggcacatagtaagcactcaataaatggtagttacttttgttgagctcagctggtagtttgacctccgttggtgcaatgccagagatgggattgtcagccaccacactgccaccaccctgcacacagtctgggtccctccgagagaagcacgccaaccttaacatcccctacagcatcttggtgcttcacacaccatttaggaggccaccctaacgaggcaagaggacatgggggtgtgcagaagttctgttcttagtgagaatggctggcctgagaatccagctcacctcctctgcccacagtctggactgcttgtgggaaggccatctcctcctgtctggtggtacctccactctgggcagggagggcctgtctgtgactcgctctggaccccacttcccgctctggccaagggctgtcttctgtgcacatagctcaggagcctgcagcagttccctgtatgggtggatgtcctcaggggccaagaagagaagaatggggacaacagaaacctgctttgtaggggattatgtagactaaaagcctagaagttctgcccacatccttatgacgcagccaatctggagcttcatgtttccttctaaaagtagtaaccgggtagaagtgggtgacccattgaggacacatgatgtgaggtatttctgccggattctaggttagcaaagactcaaatgggtgactcatgaatgaagggagaacaggcacaggacttaatgaaaagagtttcttgaacttagttttctgaatgggggtggggagttggggcacgtgtgtgtaaggggaggctgcctcactttgaaggaatggtgttggctaacaggatccatgaaattcctaggtcagttgaataataactgaactactggtttgactgtggattatttcctgggtattagtgggacccaacagcacattgctattaatagtatggaaataatggtccctctgtttcattgaattgctgaagtaatgataatgccatgaaccaggagaagatggttgtgggggtttctaggaagcagctgctgtgacaggccaatcccaggcttgcccccgagccctcctgtccttctgggtttgtgtttgccttgcctggtgcttcctccctcattgtgttgttgaatagacctaggcagccttgtatccatagaaagcctccactgctgggccggggagggggttgtggtaagggccctctggaaatcaagcagagaatgcctttgcagtggtctcccgggcattgggcagggcctagccttttgcagcccccagaggaccttgcctgcataaagcactcagaagggttagccacctggtgattttgtctctagtgaaactgtgtttgccgataatcatccacatagccacctctgtcctcgcagtttggatgcctttttttgacacctgcgctaggttcttgtatgctggcttttcttaaaggaacagcagagtagaaaagaggttgagaatgttttctagcaggcagaatgtgcatacatgttttcatgagtgtcctttgggtgctgtttcttttaaatcctctgtgcacagggctctggcctttagtaaactgtttttctgtcttacgtcatgctgactgggtgctaggggctgattacaaaggggaagagttgaacagacatcaggggccgatgaaaccaaaggactaggagtcaggagaacaagtcagggattaggagacagcggtttggtttattgttatccagctggaggactcctaggggcagcagcaggaggaataccagggccacggaggggccaggagtctcacagtggagggcagactctaacagatgccagctgaacgctcgctggccctggatgtcatacgagttggggaccagaaatctgggctcagagaacccgtccagggagatttgaagccatgggttatcttctagagttgatactgataatatattttaatttttattgatgtttaataccttctgaaacaggagggtaagatcagatgggaagcccctctgttgaaggatcttgggaaccttggtggttttttttttttttttggttttttttttttgatcgagctgtggacatccttcttaattcgattctgaggatttgtttaactaaaaagttcccaaacacagaaagggcctccccacctgctttggggagctgtctgtgctgggagtgccaggcatcccatgggacccatcactgccagtgtctgtgcctcccagaggtcagccgtgtctgccctggctctgtctcctctgtgacagggcagagcatttctggtcagtttctccatggtgcctcccacccctttgtaaagtggatggacatgatggaattcagttgtctcaccctgatagcctgggtgttgatattcactttacccgcactcagacacaggcgaccttgaagcagttctcggtgtgtagagtccacgtgacagtccccacagcctccccagatagctgtgtgcctgtgcgctactgctgtgccattttcccaacttggcgtttcactaaatgcagctgatctctctctctgtgcactcgtgatccatgttgaacaatacatgtaggttctttttccacgcaatgtaagaacatgatatactgtacgttggaaagcatttaccttatttatatacctgaatgttcctactacacaaataaacatatattaaattctagatcatgtgtggttttcgatggtgggggtggcggaaggccaggggtgtggacgtttggttgcttatgtggagccagcattatttcccaggatgctgctgaccaccgcttgcttctagagactccctctgtccttggccttggcaacctgcccccccggctttcctcctgcccttggttgctcctcctcggtcttctttctgggtgtctcttttctgggccatcccttgggtggtggcattctgcctgaggctctctttcgcccactgaattctcccctctaggtgttcccaccccctcccaggatcctgatcaccacactcatttcaacacttcccaagtccatgtctctagcccaagtgggcctgcatttccagctgcctgtgaggcctctcacacagactttgcatgataaaacccaaacctatgacccatgtcctgagtcctgtgttctctaactacccatgtgttctgtcacacaagccagtaactggagtgatctcatcagtcacccaagcctgcccgttctgccttccaaacatcctcggaatcatccttactgccagccttctgggccaggccccatctcctgccaggatttctaaggcagcctctagccctctccctacagcctggccacctctctaatccatttcttgcatgatagctgggatgagctctctgcttggaaccctttgggtcttgaggttaaagttcagacttggtaacgaggcttctggggccatctgtgagctggccagtgcctgacccacgcattcgggccctgccttcacagccacagctgccgcttgtccttccttgttccaggtgtgcgcctgtcccgggccctggcgtgggccctctgcccagtttttttcctttcccagctcttcgtcagcctgcctaactcctcttttcctagcagttctcaccgtcaacagcacttccttggggaggccttatgttgtctcctcactgtgtgtctcctgccccaggacagaagggtctgaactcctgggagccagcaggccagccttaccagggcaaatgtctgaggccagtgggacctctagattgattaccttttggacaggggcctctgccattttcacccataggaaagctactaccattggaatttcctcagtgaattgctcgccaacattcaagatgcagaaaaacccactgcattcacttactttcctaaaccccacaaaatctgactgcaagccaccagtttccaagactgatgggaaaaccaacatgagtcgttttccctggctgctttgctcccttttgttgcaccaggagccgagggctcacatgttgctgaagtggtgagggtccctgggctcaactccatctgctgaaggctctgttgtccagccctgtgaagtccataggaggccctaggccagtggcgtcagagcacctgtgcagttgcctgcatctggcatccttccatatccagagccccccgcacactggtcttgatgatttcttttttctcctctctcctttctttctttttttttttattattatactttaaggtacatgtgcacaacgtgcaggtttgttacatatgtatacatgtgccatgttggtgtgctgcacccattaactcatcatttaacattaggtgtatctcctaatgctttccctcccccctcccccaccccacaacaggccccggtgtgtgatgttccccttcctgtgtccaagtgttctcattgttcaattcttacctgcgtgagaacatgcggtgtttggttttttgttcttgcgatagtttgctgagaatgatggtttccagcttcatccatgtccctacaaaggacatgaactcatccttttttatggctgcgtggtattccacggtgtatatgtgccacattttcttaatccagtctatcattgttggacatttgggttggttccaagtctttgctattgtgaatagtgccgcaataaacatacgtgtgcatgtgtctttatagcagcatgttttataatcctttgggtatatacccagtaatgggatggctgggtcaaatggtatttctagttctagatccctgaggaatcgccacactgacttccacaatggttgaactagttacagtcccaccaacagtgtaaaagtgttcctatttctccacatcctctccaggatctgttgtttcctgacattttaatgatcgccattctaactggtgtgagatggtatctcattgtggttttgatttgcatttctctgatggccagtgataatgagcattttttcatgtgtcttttggctgcataaatgtcttcttttgagaagtgtctgttcatatccttcgcccactttttgatggggttgtttgtttttttcttgtaaatttgtttgagttcattgtagattctggatattagccctttgtcagatgagtagattgcagaatttttctcctattctgtaggttgcctgttcactctgatggtagtttattttgctgtgcagaagctctttagtttaattagatcctatttgtcaattttggcttttgttgccattgcttttggtgttttagacatgaagtccttgcccgtgcctatgtcctgaatggtattgcctaggttagacacaacaaaaaagagaattttagaccaatatccctgatgaacatcgatgcaaaaatcctcaataaaatactggcaaaccgaatccagcagcacatcaaaaagcttatccaccatgatcaagtgggcttcatccctgggatgcaaggctcattcaacatacgcaaatcaataaatgtaatccagtatataaacagaaccaacgaaaaaaaccatatgattatctcaatagatgcagaaaaggcctttgacaaaattcaacaatgcttcatgctaaaaacgctcaataaattaggtattgatgggatgtacctcaaaataataagagctatctatgacaaacccacagccagtatcatactgaatgggcaaaaactggaagcattccctttgaaaactggcacaagacagggatgccctctctcaccactcctattcaacatagtgttggaagttctggccagggcaatcaggcaggagaaagaaataaagggtattcagttgagaaaagaggaagtcaaattgtccctctttgcagatgacatgattgtgtatctagaaaaccccatcgtctcagcccaaaatctccttaagctgataggcaacttcagcaaagtctcaggatacaaaatcaatgtgcaaaaatcacaagcattcttatacaccaataacagacaaacagccaaatcatgagtgaactcccattcacaattgcttcaaagagaataaaatacctaggaatccaacttacaagggacgtgaaggacctcttcaaagagaactacaaaccactgctcaatgaaattaaagaggatacaaacaaatggaagaacattccatgctcatgggtaggaagaatcaatatggtgaaaatggccatactgcccaaggtaatttacagattcaatgccatccccatcaagctaccaatgactttcttcacagaattggaaaaaactactttgaagttcatatggaaccaaaaaagagcccgcattgccaagtgaatcctaagccaaaagaacaaagctggaggcatcatgctacctgacttcaaactatactacaaggctacagtaaccaaaacagcatggtactggtaccaaaacagagatatagaccaatggaacagaacagagccctcagaaataatgctgcatatctgcaactatctgatctttgacaaacctgagaaaaacaagcaatggggaaaggattccctatttaataaatggtgctgggaaaactggctagccatatgtagaaagctgaaactggatcccctccttacaccttatacaaaaattaattcaagatggattaaagacttaaatgttagacctaaaaccatagaaaccctagaagaaaacctaggcaatacaattttttttttttttttttgagacagagtctccctctgttgcccagggtggagttcagtggttggatctcagctcactgcaaccttcgcctgccaggttcaagtgattctcctgcctcagcctcccaagtagctgggattacaggcatgtgccaccacaccccgctaatttttttatatttttagtagagacaggatttcgccatgttggccaggctggtctcaaactcctgacctcaggtgatccacccaccttggcctcccaaagtgctgggattacaggcgtgagccgccgctggctgtgtgttcagccagcacttgtggagtgcctgctctggggtaggccctgtccagacactgcaacaaaaagtccttgtttcatggagctcattttagggaagaacgacaaacctgagaaaggatgttagatggagaaaaatgtagccagaaggagggaagagggattgctggtagggagaggttgccattttaaatagggtgaacagggaaggcctcactgcagaggtggtgtttgggcaaatggacacacctcgaggctgtgggggagggagctgttcaggtatctggggaagtgcaaagacacctgtgctgtggaggaactgcagggtggatggagcagggaagtggggaggagcactggcaggaaacccaggggaattacacagggccaaggccattggcttttactctgagcaagataagaagctgttggggagttcagagcctaggagtgtcaaagtggtgtttgtttgcaaagggctgctatgttgagaacagactacagtgggccaagggtgaaagcagggtgatcagagaggaggcaacagcagcgatccagaagagagagagacagacacacacacacacagacacacacacacagacacacacacacacacacacacacacacacgtggctcagcaggggatatgggagtggggcggtggtgagaaatggtcagattgtcagaatctgcagaaggattaggtatggaggagagggacgaagaggagtcaaggagggctgtgaagttggcttgggcggccggaaggatggtgctgccatttctaaactgtggacggctgtgggaggacaggtgcaggtgggaggtggattagagagggtcagtcaggagtttgggtttggacacgctaggtttgagatgcctgtgagatacccacacagggatgtccagtcctggggagtagtccgagatggaaatagaaatttgagagtgatgagggtgtgcgcgttattctacaccaggagccggaagactggataaaatcatcgacggagaggagctaaggtctggagatgagcccctccgtcgttttggacttgaggatctactttttagctagggctactcccttcccttcaataagacaatccagccttcaggcctggggaaaggcctgggtagagttgccttcaggtggccccactcccacctcacagcagaagcagctattaattttctcctggggccagaattctagaggcctgagtgctcttcccttgagaagaaagggcagctttaccttttggtctcctgggaaaggagaggaagggaaacaaagcaagagtaacttctctatttgattatttagaggccaggcagtcggggtgggaagtcccagagatggactcatggcctggccatggcgtactcacttacacgccatccaatatttaccaaaggacactgccagttcccaaatcaaccaaaacttagggagttctcaaatgaaataaacaccattgtgccatttccgttaatatcacttctcaattttaacaaacttaaacacatttttagggtaaaaagcacatccatcagactgagtctaggttcagggtaaattctgatctggatttgaccaagggaactgaagttattcctgcagcaaagatttgaccgatggtggatttgactgaggcaactgaagttattcctgcagctaagatgggctctctgatcttgcccacatggtctctatttctcgtagattccaggagccttagaggtagagcctttgaagccattgattctcaaacttggctgcacattagaattgcctgaggaacctaaaaaactaccagtgcccaggcagtatctcagaccaatgagataagagtctctgggggtgggatgcaggcatgagttttaaaaaaagcagttccctggacttactccaaagtgtagctgaggttgagaaacagtgattgaaacttcctctagtgagtccagcccctctcagaaacccatcataactggtcagcaccctgtgctggagcatccccagggtgagcctcaggatgtcccgaggtgacccttctggggtaggtaatgttgctgttccatccagtgctattattctacatcacaagctatagggcagaatggtgtgtgcctcccagtgcctttgcccaggactcctgtcttctgccttttttttttttttttgagacagagtcttgctctgttacccaggctggagtgcagtggctcaatctcagctcactgcaacctctgcctcccaggttcaagcaattctcctgcctcagcctcctgagtagttgggattacaggtgcccgccatcacacccagctaatttttgtattttttagtagagatgaggtttcaccatgttggccaggctggtcttgaactcctgacctcaggtgatccgcctgccacggcctcccatagtgctgggattacgggcctgacccaccatgcccggcctccttctgtcttcttacacctcatagactgaatctgattcctcttttgcataacacatgtctacaatgattcttaagtgcctcctggccttccccttgctgcccagccttctcttcccaagttttccatcttgttcttttcactcttcctcacgagaaatgcctcccactcccttcactatgctgaccagttctggatacccacaagcttatcctttttgggggtccccagtcactgcctgtagttgtgcaccagtgcatgtgttagagggggcattcatgggatcctgtgggcactgacgatacccgtagccactgcccaagagtgagcttcttccccgccagagcctcacgggcccctaaattccctgtcgaccatggtgttcatcaggaagtggggccaggagggagccctctggtaatctgtcagttattagagaacctcctgaatctggggagctggggttggtggcttcctgaagttgtaattatttaactttgtattttgaatagttttagacttacagaaaagttgtaagaatagtataaagaatttcctacatccttcacccaaattttccaaatgttaacattttggcacatttgtttatgttctcactccacacacacacttttttttcttaattatttgtaagtcgtagacatgcccctttactgttatataaccttattcagatttcaccagttaccccaatagtgtccataatagcaaagaatattaataatatgtttttgactggtgcaatctgaggagctctgcaggagctttgagaacaagaaatactcttcctggccaccccttcctttctgtgatagagacgcctggggctgctgctgtagcatagtgaggcagcatagtgaggcagtgctgtcacgggcccagcagagggcagtagtagtttaggagtgaggcacaggcagggcttagaagtgagacatccttatccgcagaggatcctagcgcagcattcactagctttgtaatctggaacaaaacccttaacaactcagcttccccctctataaaataagggtaattgagaaaatttgcaaagcacgtgtctactcctagcatctagtaatcatccaacagaaagttttatttgcactattttaaacttttatttgtaatgttaccaccttggctgagaagtgaatttctcagggatgccggggaagaagcagagaaatgttccagcaaaggcagaggcagggcgggacattgaggctaggggcacagagagggaagggagttcttgggaatgaaggggaggggaatgaagtggtagccgtggctgaccttgcattgaacccacccaggccagctcgaactgaaattcacactggaatgctgactatttcatggcattgtccaggtgctagaacctcctccacagccatccttaccaaatccataaaggaggaatggcttgtcttcttttccatttgggctggggaagtgcctgagttcgattcctgactccatcccttagtgtctgtgtggccttgggcaagttatttaacctttctgcgcttcagtctccttgtctgtaaaacaggagataataccatttatactatacggggattatactcacccccggatcattgtgaggattaaatacattaatactttcaaagagcttagactagcttctggcacacagtgagttttcataaatattactgttattatttcagtgtctcctcccactggcaccctgttttcttcctgatctgagtgcttggccttatccttttccttttttttttttgagacggagtttcactctatcgcccaggctggagtgcagtggcactaccttggctcactgcaacctcctcctcctggattcaagcggtgcctcaacctcacgagtagttgggattataggcactgccaccacacccagctaattttcgtatttttagtagagacagggttttgccgtgtcggctaggccagtcttgaacccccgacctcaagtgatctgcccatctcggcttcccaacatattaggattacaggcatgagccagcgtgcccggtcgcttggctttttcatgtcacccccgaggtggccccattctgggtgggggagttactcttgggtttgggtctccctgcccctgaacatagctgttgcacaagtagctgctcacactgaactctacagagccatcagtcaaccttgagggattgttatctgaccaaagactttctatctgtccattatttattgctgcaaacataccggaaagcaaggaagccataaaaagcaaacagtagggtcatgtcaaaatgaggcagagccagcaagaagaggctcctaaacatgggacattttgaacatcagtaagggtaataactgcagttgatggaaacacattgattatatttaagtacatgaattcataataatacctaaattcatgttatcagtattggaggatgtgggcaaaccaactctatttataaaactagttaatgaaaggaaagaagcatgtttcctgccttttctaaataaactgtaccattggtgttaaatatctggtttctaaaaaatgttattttaatatatagagataggatcttgctatgttggccaggctagtctcagattcctggcctcaagcagtcctcctgccttggcctcccaaaatgctgggattacaggcatgagtcagtgtgcccaaccagtcatttcaataaatgtgctggatcaattgtatattcatgtgaaaaattacctcacatcataacaacaacaacaacaaaaatccagatggatttttaaatccatctaaatgtgaaaggtaaagcaataaagcttttgaagaaaacataggagaccaccttcatgacctcagagtaggcaaagatttcttaaacacgacacaaaaaggctcactataaaagaaaaaaattgataaattagactaaagggccactgtattagataccttgagtgattgcaaaacctggttcttgtccttatgaagttcataataaagccgattgttttctttttctttctttttttgttaagagcagagttttaaaagctggctgtcctccctgttctgctctccctaggtggtagactacctacccctcaggcatcctgctgttaattcgctgagttcccagagagcagggctccccaacaaatagctgatctttctcccttgcctggcctagatcggcctctgtttagagaggtggtttggtggttgaagaatgagaacagggtgggagggggacaaacaggcctcttctgtgtcattgacagctgatttttgtttgtcagcgtgctaaggttgtgaagttgccaatccgtgatgattaagattctgttggggtcctttggagaggagagaggtggtggcttctgagaacataaccagaaggcttttagggaaatggaaaagtcatagtacggagcttcagcctagtcattcactgagctcagaagtgctcctcctcacccctcctctcccttccttttcctttctttactagctgggattgttctttcatttattcataaaaataaggtacaaaaacaaataatgccttgccgttgttattaagagagacatttaaaatggatcattgaaatactatgtgggaaggcttattcatagttaattattaatgacacttatcaaagcttgtcctggaccaagtattgtgactgtctctttatttgcaccatttcatttcatcgtcatagcatccttatgagctaaatattattctacgtatttaataggttatgctattgaggcttataaagatttagcaacttggtcaactatattgttaagggtctcaagacaatcctctttacaggtccaagcccatcaatcaaatgtcatttggcaataactctttcttattttgttatcaatgtgtcacccaaattatttggagcctgaggccttaattaaaaatctggctggtgtgattataatgtggctgagtgctgatgccaaatttaaagtcagagtgtgatttttttaagctatgtatttcagaaggattgatggtggctacttgccttgtgctccagagcagcacccccttgatggcaagccactccaagaatgtttagggccgtagctggctggtccccaatagagaaaacccaatggctgtgtttctggagcgacccaaggcacaggatacaaacctgtccatgccacaattattgcatctactaggacgcactgattaaaattctgttttcccctgagaagacatttatttctcaataaattcaggaaaccatttgacaacatccagtactctttaatgataagaacactcaacacgctggaaagagaagggaacttcctcaacctcataaaggatatttatataaaagccacagcaaatgtcatacttaatggtgactgactgcttttgctctaagactaggaacaagagaaggatgtctactttcactgcttctattcaacattgtactgaaggttctaactagaggaatcagggaagaaaaaaaatcataagtcatctagataaaaggaagaagtaaacccatttgtatttgcagatgacatgaacttgtatatagaaagccctaagaaatccactaaacagctattagaactaataaacaagttcagcaaggttgcaggatacaagatcaatatacaaagtcaattgaatttctatgcatcagcagtgaactatgtgaaaggtaatccagaaaaccatctcatttacagtagcatcaggaagaataaaatacttaggaataaactaaaccaagggggtaaaagacttgtccactgaaaatggcaaaacattaatgaaacaaattaaagaatacattcataaatgaaaagacattttgtgttcatggattagaacacaatactgttgagatgtccatacaacccaaagcaatctatagagtcaatgcaattcctatcaaaatcacaaagactttttttttttaaatacagattttatttatttattttaaatttactgagacaagatcttgctgtgtcgcccaggctggagcgcagtggtgccgtcccagctcactgcagcctcgaactcctgggctcaagcaatcctttcacctcagcctccccagtagctgggactacatgcacatgacaccacacctggctaacacaatagcattttttaaaaaacagaaatagaaaaaaacaatcctaaaattcatatggaaccacaggagacccccagtagccaagccaattttgagaaagaagaacaaagctggaggcatcatacttcctgatttcaaaatatgaatatattacaaagctacagtaattaaagcagtgtgatggaataaaaacagacatgtagacaaatagaacagaatagatagcctagaaataaacccacacacatatgcacatatggtcaactgatcttcaaaaagagtacccagaatacacaacggggaaaggatagtctcttcaacaaatgatgttggggaaactggctatccacatgcaaaataataaaacaattttttttttttttgagatggagtcttgttctgttgcccaggctggagtgcagtggcacaatctcaccttgctgcaatctccaacctccctggttcaagtgattcttatgcctcagcctcctgagtagctggaattgcaggcatgcaccaccccgcctggctaattttcgtatttttagtagagacggggttttgccattttggccaggagggtctcaaactcctggcctcaagtgatccaaccaccttggcctcctaaagtactgggattacaggcatgagtgaccgcgcccagcctgaaattggatcttatatacaaaaatgaactcaaaatagattaaagatttaagcgtaagacccgaaactgtacaacttccctgagaatacatagagggaaagcttcatgacactggatttcacaatgatttcttggacggggaatcagaagcataagcaacaaaagtgaaagatggctgggcatggtggctcacgtaggtaatcccagcactttgggaggctgaggaggacagatcacttgaggtcaggagttcgagaccagcctggccaacatggtgaaaccctgttcctactaaaaacgcaaaaattagccaggcgtggtgttgtgcgcctatggtcccagctactagggaggctgaggcaggagaatcacttgaacccgggagttggaggttgcagtgagccgagatcacaccactgcactccagcctgggtgacagagtgagactccatctcaaaaaaaaaaaaaaaaaaaagtaaaagacaagttgaatcacatcaaattaatttcaattaaaatttaattgaagtcctgctccatctaaggagtcagggagtaggatgttaatctgccaactgcaaatcttcattgattgagggctgttccttggggcatttcttcctcagcacttctggtctgctgtgtgttcagctgagaggaagtgccaaggcagagtcaaaggttattacagtaagaagctgctagtggccagtacatgtaaagggaattgacagcatctgcccctattgtccagtatggtagccaccagttgcatgttgttgctgagtacttgaaatttggccagttggagctgagatatgctatgagcataaaatacatcaataattttgaagacagtagacagaataaagaatgtaaaatatctcactaataatttttaatattgattgcaatgataatattggttgcagtgatatttcagatataatgtgttaaaattatataagctaaatttacctgtttctttttactttttattttatataataatttcttcttttgagatggggtctcactttctgcctaggctggagtgcagtggtgcgatcatggctcactgcagccttgacctcctgggctcaggtgatccttccactcagcctcttgaatagctgggactacaggcgtgtgccaccatgcctggctaatttttaaggcttgtagagacaagcttttgccatattgcttaggctggttttgaactcctggcctcaagtgatcctccctccccaccccctctcacctcagcctcccatagctatgggattacaagcttgagcccctgcaactggcctcgttttactttgtaaatgtggttactacaaaatttaaaattacgtctgtaatttagctgcattggtagcttgtattatatttcctttggttattgtgtgctccactcttacctcatactaggaagttaggacttaggttatagccccagcgtctgacagctgataagaagtggaatcaaggttcaagctgagtccagagcccacacactgaactgctggacatgcaggacagcatggcagtactttggacatgcccattgcttctgccactggttttcactgaagaaacctcccccagtggcctctaggctctgagaactttgaacctcatgcagcagctgttgcaaccttaggcatgggaaatgacatccttagatgcccttcctgatgggcagctggtgagtcttcttccagctattttagtgaggtgggtagcagtgcatggggttgctgaggcacgcaccctcggaacatattggtgtctctccctaatggggcagcctactctgtacatgtcagaaaaggtgcctgtgaagctggcaatgtgagcttatatgatcctggccatgttggccacaggtaggattagccattggcaaaaagccaggttggccaagtttatttctggtgccttctcacttccacacccttttgtcattgcctcctgtgcagtcttcagggtcctggaatttctatttatcttctacacatctatggggattttctaacacatccaggacacatcccggcctctgtgtccatgccaggttcctccatgccatccggggccccggccactgccatgatgactctgtctgtttctgtcttatgtaaaagaagtcccaaggttgagtgctgtgattttggtgctacaaaattatcagaagcccaagctccttccagcttttggttctggggtgtggcctttgattttgtggtccaaggtggctgcaggagcgcttgttatcacatctacattccaggcagcagggaaagaaagggaagaggaaatatctactaaatccccttttagatttcccagaagtcccagcaacatgtctgcttataatccattggccagaattgagccaaatgcaaactctagaacaagggttgtagggaggggctaggaaagcagcctttattctggccatcaatgtgctgaaatgaaagagctctgttactaaggaaaaagggaagaatggttattgagaggcaactgttgttctctatcacagtcatacaccactttggggagactggtgtgaaagcacaatggggtcttgataaatgctatggacacatttcatcattaacaggcagcatgagttgccagtctcctttcaggctgctttcaccagcagaacaaacctttgtggccaaattcttgcctttgatacctctgcttccaagaaatgatgtggtgtgcacatgttctcacttgtaagtgggagctgaacaatgagaacacatggacacagggaggggaacaacacacactggggcctgtccaagggattggaggggagggagagcatcagcttaaatagctaatgcatgtggggcttaatacctaggtgatgggttgataagtgcaacaaaccaccatggcacacgtttacctacataacaaacctgtacgtcctgcacctgtatcctggaacttaaaatcaaataaattttttttaaaaaaaggtagtgtgtgtgtgtgtgtgtgtgtgtgtgtgtgtgtgtgtgtgtgtatgcctgcatgaggcggcagggggcggggggagggggcggtgaggaggagagacagagtccaacttccccgttgccttcctgaaggtatgagcagctcatcctctcatcctccctgtctgtccctaggaagccacagcaagtttttgctgatgctttagggatagggatttgagtcctcttagaaacaaatagaaccagtgagcacttcatgccatttctgctacaacatctttgctaaagacattattgttatttaaaaaataaattaagattcctggacttgtatattcaatatggtaatcactaaaaggctaaaatcccccttttacccacaagacagaggttccaaggtaaggtagccaggagtttagtccactccttaaaagaggtcactgtggaatgtgtttctgtttgtgcagctatggaatagctataagcaagtgtgtggcttagcagtaaaccctttctttagcctacgggttcaaggggtgggggggctcaatttggaaatgaggaattaaggaaaggaactgtcataatctttcatagaattgtgaatttctgacatggatacgtgggcttaactaaatcaggcagctggggaactatttcacctcttctttgtaggtagtgtgtttgagaatttatggatgtctatgggagatacagtagctgactggaaaattaaacatgaacaggcatctctgcaaatcctcctgggggcagagcttgggagggacatgagcacacacaggaccacttggtgggacttcgatgcttccagctcctttctccctactatttggacaatcttggagtggcagacgattttgtggaatgccacatgggagccactgggcatactcctgggggaagagaaatagccccgggtaagaccaggcactctgggtaggggcaggatttccagaaggtgcatggggattcaccagcaaagatgaggaggcggcggctgcattcaggctggaaactaaggtcaagaaccagggatatgtatggagaccccctgggaaggacttaagttcttggatatattttccaatggttatggggagagtaattacacataactttaatctcctcttttgaagggcttattaaacatgttctcaaacatacacccatgcaatctttgtaattcccctttagatacggcagtggtgaccatcagagttggctatcggtaacaaattcttacagttggggcaagcagaaagggatttatatagtgaattaggtgcttgcaaaatcactggacaaactagagaatcagactctgatggggattcaccagcatcaaagtctgcctgagctctgggaataatttactgagtgacactgcagaattggccatcaagagagctgccacctcctccactgtcagggagctactgcgcatatgactggctctggcgacaaacaccccctgctgaggagaccagggcattgctgccacaaataggccaacttgaccctcatgaggtgggggttaaggtaccaggaactttctgcacctctgcagaaagctaaatcctgccaagagtgtgttggctagtagaagcagcagatattgtggaagtgggacttacagtgcagttggactacacgcatcacaggcaggggaaattgatctttagctcccctttagggaaacaagggttgaaacagacaggaccaggtaagaagctggtgcagtaaccctggtgcggggtatggtttcaaccaaagcggtcaggctggaaagggaggcacagaatcccttggggtgtattttagaggcaccattggagcctgctgatgaattggatgagagtggtgagaaaaaggaatcaagaacgagtcttagccgggtgcggtggctcatgcccgtaatcctagcactctggaagaccgaggtgggtggatcacttgagttgaggtcaggagttcgagaccagcctggccaacttagtgaaacaccgtttctactaaaaatacaaaaattagccaggtatggtggtgcaagcctgtagtcccagctacttgggaggctgaggcaagagaatcactggaacccaggagacagaggttgcagtgagctgagatcacaccgctgtactccagcctgggcaacagagtgaaactctgtctcaaaacaaaacaaaacaaacaagtctttagccttgcccaacagttggacaggataccattatttccctgtaagactcttactgcttagtgtagggcagaggctgttacggagatggggaaggagtaggaacatcactgggcaaaggtcatgaggatgtttcggagggaagaggacccttacttctccatttctccctgctttggagatcagagctcctgagagcagagtcttattcatctaggagttggtgactctggccagggctgactgctttgctgcatttgtttctgttatctttgttttgacagcttctctttttctggcattttgtgggtgtgagcataattaggttggcagaaattacagtagttcttatgctgggacttgaatgtcatttgcatatttcaaattcctctgtgaaaaatgacttcctgtctatcctggagtctgaagaacaggacctaaaggaagacgtaaaggaggaatcaatttaactaacccagtaagcagctggtttgggttaggcttcagacatcaagacaagaatctgagtgcaactagtgtatttgtaggagctcaggaagaacttgcagtggagtggagaggcgacacagataaattttattgatgagcaggttgctggccaggcacagtggctcacacctgtaatgccagaactttgtgaggtcaaggcaggaggattgcttgaagccagaagtttgagcctgagcaacatagggagaccccatctctacaaacaaaaaattagctgggaatggtggtgtgtgcctgtagtcccagctactcaggaggctaaggcaggaggattgcatgagcccaggagttcaaggctgctgatctatgatcatgccactgtgctccagcttaggcgacagagcaagatcctgtaatgagcaggttgctgtcaagggcaactggagcttaattcccctgcagaaacttgggagattataaagagcacttctcaaagttgtcaccactaagagatgaggcaggggcactagatcctgcagcatatcctccctgctgcacctgcagccaagaacattcctgcagcgagagatagctcttaggcaatgagttggaagcgcttgctgtaggaagccattgcctgtgtgggaatggtgacggccaagggcatgggggcagggcactgatggtgctgctacaactgcataatacaaaggatgctgtcactaccagtgacagttcacagtttgagatcctcacaacttagaaacaacagaaaaagaacttctataatggttccatctccaaaatattatatgaatttctttctttttttttttttgagacagagtctcactctgttgcccaggctggagtacagaggcgtaatcttggctcactgcaacttccacctcctgggttcaagtgattctcatgactcagcctcccaagtaactggggctacaggcatgggccaccatgcacggctatttttttttttttttttttttgtattttttggtagagacagggttttgtcatgttggccaggctggtctcaaactcctggcctcaggtgatccacccgccttggcctcccaaagtgctgggattataggcatgagccaccacaaccagccaaaatatatgagtttcatatatatatatatatatatatatatatatatatatatatatatatatatgaaattatatatatggcagtggcagatctttttcaggaatgcataatatggctagctttaatttagtgatacttggcttgtgtgggctcagccctgctggatgctctggtgcagattccatgttacacaagggggctaggagctggggcctggggccatggagaccaaaatgtagcccagctcaccttgtcttgtgtccttcaaggagtcatgtctgaagggtctatccttttatcatttggacagagttgtcatacacattaatagagtgccaaataggaaaggtttagaaaagaatgctttatctgcatagtttgtcatttcatcaaccattgggcacaataaaggcactgcatttgcatcggcatggatatgaagatgagtcatagttagttctaggaataaacagatttattcccaaatcagttcaaatagagactggtccttctgagggcgttcactattaagctgcaaaagactaagtggaaagtcacgtcagtcactttaagaacagcttttacttaaaaaaagtaaagcaagcatcaaataacagctcacgcttaccctacagaaaggggcagaaggaaactcaggagcccaccagttgggtctcaaagaccatcacgctaaccagctttgggagatgtgtggaaataaatgaggcaatgctgactttgggaccccctgtaattcaatatccagtgaacataggtttaattggccttaagaaatttaacaggaaggttgcaatccaagctctagctgtgggcatcttacaggtgtggacacttgtgtttggtggtttgcattgctataaaggaatacctgagactgggtaatttatgatgaaaagaggtttatttggctcacggttctgaagactgtacaagaaacatagcaccagcatctgcttctggtgagggcttcaggaagcttccaatcatggtagaaggtaagggagagctggtggtgtcacatggtgagagggagcaagacagaagggagagctcccagaatcttttaaacaaccagatttcctgtaaacaactggcaagaactcactcatcacccctgggaatgcaccaagccattcatgagggatccacccccatgatccaatcacctcccaccaggccccaccttcaacatgggaatcacacttcaatatgagatttggagaggacacacatccaaaccatgtcagcacttcagggggaaaacagtgacagtgcaaggagggtctttgccataagcaaagaaatgggaggaaggagtgaggcattggccaagttgggcacccctcttcttgcctctctgagttcatgtctcatactggcagtgtccatgcctggctctcttcttgccatttaggtttttatgacatggatctctgtaacatcgctttgggaacaaatgcatgttttacttatactttctcttacaagtgatgcacttctcatctgatcccattccctcccttgctaccaccttggaatgtgccactgtaacctcaccactggattatagtacctgttcctgactggtctcacttcttatgtccctgttcctgtcttcagttggcagagtgaaacagctcactcagatcctgtcccttctctacctagaaccccgtaggggcttttgtcttgcttaggaaaagccagagtctttacagtgcctcccatctggcttaccttcctcctcgtgtcccctttattccctctgtaccagctgcactggcccctggaagagcatgctgtccaagttgcatcccacctcggagtctttgcattcactgttcctttgcttgcattgccctttcaggcggtctacgtggcttcctcccacacttccttcaagtccttgctcagatgcctccttttcaatgggctctctcaaacaacccatctgacagtgcacacacttacacccctggtcaccccctcaccctttcctgctttattttttctcttagtgcttgttggtacctaacatattacatattttacatatttcttggttccttatctgtctctccctctagaaggtgagattcttgagggtgagtttcttttcaccctcaggtatccctgttgcccagagcagtggctgggccatggtgagtgccctgcaaagacacattaagtgaacacatgtgaacagtgaggacctggaggtgctcagtctatgaatttttcagcaaccatgccaactggccaccgtgatcatttcgctcaagcattctcagcctaggtgttctggtcctctctcatctcctgcctccatctggctgtatggacaaaagggtgccatcgaatcctctgggctgtggtttccggtaaaataatgggtttgaactggatgatttgagtctcccagatccgaattttagtctcccaagtctttgatttttttgtcgtctaaatctctaccttcacatggccaagcttcaaacaggctatattataaacgggacatattagcagagtagttagtgattccctttgtggagtccctgtctccactgcttgtagcagaagccatcagtgaccagcctaagctcttgaaactgactgttccaggtcacaccaactgtactccactgtgagctcctgggcctttgtgctggagggttttctatccaccagggatgggcgggctggaaggtgtgaggagtgtgtgtccctgggagtggccttcagccaatgatgtgtgagaattggataaataatccagctccttttcccctctggggtgtaactcccaggggtgttctaccctgtctcccagagttatcccacacgattgagccccagttgcccagggtcctgtcctgcccattaacacttcctatcatccctctattgctcactccactaccccttcccagtgtttcctgggatcacctccctaatcatctacttgtactcaaatccctgccttgggctcaacttctgggggactctgacttctcctgctgacttcttctcagcaggcacagagcctgctgcctccaggcagctgaaagcacctcatgcatgtgcttgttgggttctctttctctgtatgggcggagtactggcctccaccctcccttcccattgcttcatatgtccttctatgggctcctctttcccctatatggctaggacccatttcctcccacttccccttccacagtctccacttttcccccaagcctcaggaagcaatgccaacattactatgcagtgcagtttaactcttctttatccttacctctctcacctaagctattcacatggggatcttcaccttcttgaccagccccacccttcaggactctaagataagcaaaacaataggtctcccctgcacatgtgcctccttctctgggtttgagctactgcacaaactgtaagtagttaaaaaatgtgttttccttgtcacgttggactctgtgagctcaaagtctaccccgaaggcttcataccacagctggaaattgcgttttattcacaaagcatccaggatatgacgcatttcatatccacatgaatgacaacgagcaaagaaacagacaaattgtacgaaagaataatgttccttcttcctggaaattttctaaaagggataggatgagaactctgggtcttattattttaaaaaaatgccatacagcctcaaattgcccatcaacctcaagcacacacttgaatgtataatttttcttgaatatccagcgtataaatattagcttccatgtccttgactagagtaatagcatggacagactgtggaaaggctgaactgcctgcctggaggcaagttgtgtttgaaataaataatgcatttcataatcccatgtgacatcatgttctatggagccttgagagatgtaatctactaccattactccacgctcctcaagcatttctaattaactcaagaactgtgggccctgtgtggagctgaggacgtagaagaatcggtgggggacaggggggatatgggggagaaggacaaaccagaaaggtttttgccttccttctcagtcctcatctttgccttggccattgcagtccaactctttgcctcaaagataaggaaacaaaacaaaacagctaattgtaaatctatccacctaaacatctaaccctggtgctatggtttgaatgtttgtcttctccaaaactcatgttgacatttaacccccaatgtggcagtattgagaggtggggtctttaagaggtggttgggtcatgagggctcagccctcatgaatggattaatgcattcatgaatagagggttaacacatcaatgagttatcatgggagtgggactggtggctttataagaagaggaagagagacctgggctagcacactcagctcctcaccatgtgatgccctgagccacctcaggactctgcagagtccccactagcaaagcaagaaggccctcaccatatgcacccccttgaccttggacttctcagcttccataactgttggaaataaattccttttctttataacgtacccagtttcagatattcttttccaaacaacagaaaatggactaaggcacctgggaagcagctaggtgatcaaagtgtgacaatatgacggattacttcacagtcctatagtcaggttctaaataatattgagtcagtaaaataatattgactgctatagattgcagactgcaaagcagagtgtacaggaggtccttattttggtaaatcatatagggagatgtaaattataaatacatatgcttatattacatatacgtgttaactacttacatataaaaatcatatatacataaataccaggggagtagaccatattcaaaacaggtacactgagaggaggggtgatttgaaatgtttggaaaaatactatctgtgtgttttcacagtgtttcattgatatatttttctttctttctttcttttttttttcgagacagaatcttgctctgtcgcccaggctggagtgcagtggcccgatctcggctcactgcaagctccgccttccgggttcacgccattctcctgcctcagcctcccaagtagctgggactataggcgcctgccaccacgcctggctaatcttttgtatttttagtagagacggggtttcaccgtgttagccaggatagtctcgatctcctgacctcgtgatccgcccacctcggcctcccaaaatgctgggattacaggcgtgagccactgcacccggccatatttttcttttataaatagaaagctatataaataaatattgtctttcctcctgcttccataattattgatacagatagtttgagcaaaactacctcttctcccagctgcctttttttcaacctcagatgtggctccattgttcatactaacatccttctgctagctaggggtggtgctcaaagggtaggatgctgttaaaacatcagtagatctgagacctcggctctccatcctgaagccccctgaagaaactgcaataagcctgtttgaccccaccacttgctcattgtggttatggtggaccttgctttttcctgtcctgtgcatcaccttagacaattgggaaattacttttaattcagagatggcctcagttatggatttacagcattgcaactatgtaacattgtaacattgtgactaagtaattttaacaatgtagctacagcattgccctgctttaccgcggagacagcgccacctaatggttaaacaagtgcccagccgttccttaccaaaaggcaactcgttaattgtggagaggacggtaaaatcatagcaatatatcttccccgcctccacacaatacagtagaaatcaatagttatttgagcacttctccatcataatccaaccatcaataagtctttgggtaagattgtgttgttacaaagcatttgcccaccaatgacattttatatccccagacacaattataaaggcgaagatgttccatcaacaagcacgcctgatttaatagcatttcttgcccactgttactcaaagcagcctgaatgcaggagctctcaaatgcttccctgcggcataaaccaccctgagatgggtgtaggaaatacactaatgagacgcctgagtgttcacaatgcttccacacactaggagaattggtctttattggtggcctctggatgttgggaataatgaaacactatgaccagggttttctagcagtgttgagaggtgagatttccaggctaacccagaatcttggcctttcaagagctagtcgatgtaggtgaccacatccaggcacacaccctttctcttccatgcatgcattaccaactggagaggatgtcgtgggggctgtattccggtcccctgtattagccagtctagtgcagccatctcccagctgctgtgagtgttggctgctatcagctcacagtcgcccctcttctctgaagatttttccttgtgcaagatcttccttgctctgttagttctgccctctctcccgcagcccacagccaatgactgactgacatgggggtacaaagggccagcccttttgccttaaagtgggaccagctctgtggtgcagttcctgcttcggagctaagttggactccagctaagaccacatctttgctcagttccttcccctgccccctcctacttcactcatctgtcttctgctgagttaccctcaataaatcccctgtacccaaatcctctctccgtctctcctttcaagggacttaacctaatactgtgaacttcaaagaaatcactcaaacacacttcacaggaacacttttcgaagatatttttgttgttctttgatgattcagaagatacccctagactgtgcagtgtcactgggctcttattatgaccatcaattaattctacaggtaggaagaattttttttttttttttttttgagacagagtctcgctctgtcacccaggctggagtgcagtgacatgatctcagttcattgcaacctccacctcctggattcaagcgattcttccgcctcagccttgcgagtagctgggattacaggtacatgccactgtgcctggctaattttttttgtatttttagtagagatggggttttgccatgttggccaggctgcttttgaactcctggcctcaagtgatctgcccacctgggcctcccaaagtgttgggattacaggcgtgagccaccatacccggcaggaagaaatattcttgaacagagctctcctatggctagaggatgtaattatgtatgttgattgaacagcagtcaggacctagcctgtctggatctgaatgacgcaaaacctgatggcagagccagaagccagaatgatatgaccagtcgaccttgtccccatggacagtcgtgggatgcagccatggtgttcctgcgtgtggagcttcttgcttttacagcccttcgtgttgggttgtctcatttatagagacatacaacgtcagtgctggaaggaccttttgccactcctccaacagatactcgttatgccctatgctgggttgaattgtattccccaaaaagataagttgaagtcctaccccctggaaccttagactgtgaccttatttgaaaatagggtcattgcagctgtaataggtatgaggtcatactagagtaggggagccctactccaacatgactggggtccttaaaagaagaagagagacagacacagagaaagatggccatgtgaagacagaggcagagattagagtgacatctacaagctgaggaacactaaggattgccagcaacaccaggagctgaaaggggcaaggaagaattctcccctacaggttttcagggggagcacggccctgtcaacccctcgatttcagatttccagcctccagaactgtgagacagttcatttctgatgtaagccacccaatttgtggtactttgttatggcagccctgggaaactaatagagcctctgctaagtgcccatctttatggattatctgttataaccttaaggcaaggacatgccttggttccatttcactttagcccaggagagagagcttatgggttgacctgaattctttgtgcaccatatctagctatctgcatctagatttccttgtcacacacccagttcagaatgacaagcaggagaggatttcaaatcgccagagccattgctgaaggaacagagtatgcttgcttgcttgctttctctttctctctttctctctttctttctttcttctttctttttttcttctgaacaaaacaagtttttaaaattattattatactttaagttccagggtacatgtgcacaaagtacaggttcaatacataggtatacatgtgccatgttggtttgctgcacccatcaactcgtcatttacattacatatttctcctaatgctatccctcccccaaccccccaggcccagacaggccccggtgtgtgatgttccccgcgctgtgtccaagtgttctcattgttcaattcccagtgagaacatgcggtgtttggttttctgtccttgtgatagtttgctgacaatgatgatggtttccaacttcatccatgtccctgcaaaggacatggactcatccttttttatggctgcatagtattccatggtgtatatatgccacattttcttaatccaatctatcattgatggacatttgggttggttccaagtctttgctattgtgaatagtgctgcaataaacttatgtgtgcatgtgtctttatagtagcatgatttataatcctttgggtatatacccactttatttcatgaccctcaacctgatcaatgaaagtcagggggagctcagtaagccgtgctcttggaggaatctcagcccagcactgctggttgtgtagacagacagtctctgcggtggagtggggttggtcataatggcgagtcccctgcttcctcatttccttcctctgtttcttctcctatccagggagttcctgagtgtttgttattaaagttctttatgctaattattttttattgagcactgcttccaacatctctgtaggacttgatttagaaaaaaatcatgggactcaggcctagcctttccatggtcctgcctggctgtgtctggactgttgcctggagccagcagccccacgctatcctggggcccacattccatcagaagttcctttttcttcctctgtttcaagcactgcatagataccttgctcaaagccatgtctagagacaaacacacactccacaaaaagccttctctgtggacccatatgactcagtataatgcaatcattacttaatttctcaaaacacattaacctaaggcaaggtttaaaactagtaagagtagacataaatccacagttcagaaagttttcttaataattttgatttttttaaagaatggaatccttccagctctttgagaaccagaagaacaagaccacaaatcttccctgacttcacgtctttccccctttgttattccgatactcgattcttaattgaaattctacagtcctcaacagcagactcaatgtagattttttcccctaaccaactagcacaaaaagttatctttctctcagaagcccagaggaattattcattcaaaaagtgcagtgttaggccgggcgcagtggctcacgcctgtaatcccagcactttgggaggctgaggcgggtggatcatgaggtcaggagatagagaccatcttggttaacgcagtgaaaccccgtctctactaaaaatacaaaaaataagccgggcgtggtggtgggcgcctgtagtcccagctacttgggaggctgaggcagtagaatggcgtgaactcagaagatggagcttgcagtgagcctagatcgcaccgctgcactccagcctgggcgacagagcgagactccgcctcaaacaaaaaaaaaaagtgcagtgctgatcacgtgcctttaagttcactcttaataaagagagtgctctctgacatcatatagcattgtcagaaatttcctaaaataagagtaggcaggtaatgtgaggtctaattctgaagttctgaaatttaaatacacataactgtgtgtaacaagtaggaaggtggataaaggtgtagacctccaggccatgccccagagacttggatccagtagtcctgagctgggcctgaaaagaacgttgctccaatgtctgtgtagtgctttccagtttagaaattagtttcctcccttgccagactgaaggccagttcttactaatgcaatgtgtacacatgccgcacctgagactccacagaagcatgttaggttaagaatacagaatgtggggtaagggcagactagagaagaacagacagggaaggtggtttcttgcgaacataactctcaagagagaggctgggccatcaaccacaggctgagtctgatgagttgctggtgggactggagagtgatgggcagcctgttgtagaggatgcacccacggtcataatgaacagtgatctctctctctcactctcttttttttttttttttagatggggtctccttctctcacccaggctggagtgcagtggagtgatgtcggctcactgcagcctccaccttccaggctcaagtgatcctcccacctcagcctcctgagtagctgggaccacaggtgcacgccaccatgcccagctaatttttgtattttaggaagagacaggctttcatcatgttgcccaggctggtctcgaactcttgagctcaagtgatctgcccacctcggcctcccaaagtgctgggattacaggcgtgagccaccacccccaacctagaacagtgacctcctaaaaaggaagtgcccatgctggagggcagaaataaaatgtaatacctagggctatttaatttgtatttaaagccttgttaatattgcatgtatcaacagacaccgacatcctcgctgggtcacgggttatgaggctcccacggagtgggggatcccaaagaaagagaggtgctccccaagaagaggggtgctgcctgtggcatcctcacaccctctctgtggtttaaatgtgcctgccaactagatttatgggttatactctccaaatgaacaagtggcttaaaaagaattgcttcaaagaactgacagattgaagagactaatgaggcaagtcaagcagactctatgagaaaatgggggagctgagtctccattcctagtatcaataaacatcaggttcaaaacaatgacagtctaatcagtgctgaccaatagttggtttagttggtttaaaaaaaagtcaaaactattaagaattctttctagattatggctttatagccactcttgctagtttaaccttgtcttaggtgtatatgtcttgagaaatcaagaaatcaaatagtattaggctggatcatatggagttgacaacatttatctatattttgatataaaattaggaattcaatacagttcaatttaacataaagttatcatgattaatatgactttttattttttttaaaaaagcatcctaggccaggtgcagtggctcatgcctgtaatcctagcactttgggaggccaaggccggcaggtcacttgaggccaggagtttgagaccagcctggccaacatagcgaaaccccatctctactaaaaatacaaaaattaaccaggtgtggtggtgcaccctggtagtcccagctacttacgaagctgaggcacaaggattgcttgaacccaggaggcagaggttgcggtgagctgagattgcatcactgcactccagcctgggcaacagaatgagactccatctcaaaaaaaaaaaaaaaaaaaaaaaaaagcatcccaaggatgaaaaaactccagttttttattactttattttaaaagtcatgataaacctttacaaaattttattgaacttaatgataaatacttacaaagcctcttttgagatttcttatgtaagagtaaaagatgaaaagcacactatttataaacagttgtctcattctgctagaataaaaacaatggaaagaatatctggaggcaacataggggcaaaattaaagtgcagtccttgctggtcaaataagtggaagaaatatagaaaatattgccaaagatttggaaaacattacaacaaattacactggtgggaaatctgcgacacagtttgataaaagtacagatgcttctaacacgtcctagcttacagtgcttgttagactctatgtcagtcatagattgaaagagccactttttaataagccatgaaaggaaagatgaaccagataagatataatctcaataataatgacttacggaaaaaaaccagtgtttgatgttccacatcatctagtggttagaaaaaaagaaaaaaacaaaacaaagaaaaaacagtgtttgatgaaaagtgaaacacaaaaacgctgccaagagtcgtctgctttgatttggaaggggaacagaaaggacttcgcagtaagaatattgaatttcccataaataacctattgttatatgttattattatatgttatattttttcccataaataaccattgtttcataggccaggtgttacagcacagagatcaaagccagagatactgagcttctggatacctgaacatgtggagattcctggaggtggcgcacccagggagggcatggaagctctgtgcccttcccccataaaaactaaaaaagatttaagtttttaaaaaatttttagataaataaaatgaaataaaatgaaataaaagagatgctccattaatgtagcttgctttatagggacgttttataaaaggatggggatgaaaatcttttgcctgcacaggaagttcactaattatcttgtggtcaggttctttaaaaatgagttacacagttttcctttatgacaagatgtcaaatgtttcaaatttgggaaactattctgggaagacaagtgactatcaatagaactgacaaatgacaggaagggctcagatcggcagaaagtccagaaacaaacactgatgggtaagtcagtaaggttcacttatatcatgaatggggaaggaagctggcatggtcagaattcaccgcaaagagattaggaatactaacgggaccatgcagaggtgtaaacttgtctactatatttattcccagagccacacagtgtcagatggtaacatctgatcaggtgagaatcccatcagatcttctggaagcctaattgtttttccagctccagacttctgcactaccgccaggagcacctcatcactcccagagttgatgatatgccacgttgttaaggtcccagactctcaggcaggaacacagccttctatgttccctctgccttcccaggctaatgcagtcttgtccagacacattgctaaatttagtgccccgatgctgaacaggttgaaatgtatagcccttgcatggatcttggcacaaatggaccaactgcaagacattttgacaacaattggggaaactggaacacagattgggtactaggtaatataaaagaatgatcgttcattttgttaggtatgataatgatatagcggctgctatgatctgaatgtttgtgtcacccccaaaattcattaggaggtggggcctttagaaagtgattatgtcataagggctctgccctaatggatggaattagtgctgtcataaaagagacccccgagaactcattagcccttccaccacgtgagtacaaaacaaacagttgtcattctgcaacctggaggaggatcctcaccaagatggcgccctgtgcacttcccagccttcagaactgtgagaaataaattttattgtttataagctatccagcttatggtattttttttgagataggctctcattccgttgcccaggctggtgtgcagtggtgcgaatatggctcactgcagcctcgaccttctgggctccagtgatcctccctcttaggcctttcaatgtactgggattacaggtgggagccacggtgcccagccaccagtattttgtcacagaagtctgaacaagctaagatagtggttatgtaagaaaaatcctgcttttttagagatgtatatgaaaatattacgaggtgaattgtcattgtttgtagcttattattaatacttaggtaaatattagatacttaatattaaatactgaggtaaaaattagatgaagcaaatctggtaaaatattaagaataattaaatgtaggtattggctatatggcagatcattacaccattatcctcctacatttatgtgtttaaaattgtttataataaaaattttatagaaagtaatacaataaaaaacaaacacaaactgtaccatcaaggtgaaaatagtattttagtattgagggagaaagtaacattttttggaataaaatatggggataaatatttggtaagtttctatgattatattattttattgataaaagaaatataagtgaatcatttgccaactctcctcctgccatattaaaaaaaaacttgggaaaaacaatgaataatctgaaaaggaaattaagaaaggaatttcatttataatagcattaagaagaataaaatccttaggaataaacctaaccaacgagttgaaagacttgtacactgaaaacttcaaaaccattgttgaaaaaaattaaagaagagagaaataaataaaaggacagcctctgttcatggattggatacttaatattattaagatgttactactacccaaagagatctatagattaaatacaatctctattaaaataccaatggcattttttgtaaaatagaaaaatttatcctaaaatttatatgggatctcaaggcaccctgagtagccaaaataattttgaaaaagaagaacacagttggaggactagcagttattgatttcaaaacattgcaaaactacagtaatcaaaatagtgtggtactggcataaagacagacaaatagatcaatggaatcgaatagacagcccacatctatggtcaaatgatgttcaacaagggtgccaagaccattcagtggggaaaggacagtttctttaacaaacagtagtgggaaaattggatgcaaaagaatgaatttggacccttgtcctataccatatacaaaaattaactcaagatgcattaaagacctaaaagtaagatctcaaattataaaacttctaggagaaaatataggggaaaacttcatgacgttgttggcaatgacaagaatagataagacaccaaaagcacagataacataagcaaaactagacaaatgagactacatcaaactttagaagtttgtgcatcagagagcacaatccaagctgggcacagtagctcaggccggtaatcccagcactctgggagaccaaggaaagaggattgcttgaaaccaggagttcaaggccagcctgtgcagcatagggagacccccatctctaaaaaaaaaaattagccgggaatagtggtatgcacctgtacaccaagctattcgggaggctaaggcaggaggatcacttgagcccggaagtttaagaccagcctgggcaacatggcaaaatctcatttccaaaaaaaataagctgggtgtggtggtgtgcacctgtatcttagctacttgggaggccagatcaagccactgcactgtagcctgggagacagagcgagaccatgtttcaaaaacaaaacgaaacactgctgaactgtacacaaaaaccacacaatccacagagtgataggaaaacctatgaataggagaaaatgtttgtaaatcatatatctgataatggctaatatccagaatgtgtaaagtactccaacaattcaacagcaaaaacaaaaatcaaataacctagtttaaaagtgggcaaaggacttgaatagacatttctccgaagaagatataaagatgttcaacaagcatatgaaaagatgctcatcgctaatcatcagagaactgcaaatcaaaacagtgagttgtcacctcatacccattagatgctactgtcaaaaaactggaaaataacaagtgttggcaaggatgtggagaaactagactctttgtgcattgttggtgggattgtaaaattgtgcaagtgctgtgaaaaatagtatggaggtttcccaaaaattaaaaacagagctgtcatatgatatggtaatcccacgtttgagtatataaccaaaagaattgaaagtagagtctcaaagaaatatttgcacacccgtgtttatcgtagcactattcataataaccaagaggtaggaacaacccaaatgttcatcgatggatgaatgaataaacaaatgttatatatatataatatatatcacatacatatatatccacacacatacatacacacagtgaagtattattcatcctttaaaaggaagaaaatcctacaacatggatgaaccttgaagacattatgctaagtgaaagaaggcagtcacagaaagacaagtcctgtatgagtccacctatatgaggtatctagagtagtcaaatttatacaacataaagtagaatggagttgccagaagctagagagaggggagggggaaaaaggggagttgtttaaccgatatagagtttcacatctacacaatgaaagtcttgagatctgtctcaacaacaatgtgactatacttaacactgctggactatacaattaaaaatggttaagatggtcaattttgttatgtgtttttaccacaatgaaacaagggggacaggagaccttggaacataattactgagcttttttaaaagcttccaaatggagtgtttcagtagatttggacagaaacactttgttaaatatttaaaaacacatcaccctatgattagtttggaggaacatcagggaacgtggtcatttatttgccaagtgtcaacaagaatctttgcatagtaagcagtgaaagagatggaaaaatgagtttcataatttagggcagcacattaagtgatgtccttactatgtttactttttgtgagaagtattttttagctatgacagcaatcaaagccttgaaagaatacatcttcaaattattttattgcaaaatgttgcctttttaaaaaaaattaaaggagactgaattatgttgaattcagaatccaaataatagacatattttaattctatcttaatggtaactattcattataatgaacagaactattaataaatttataaaaacattaaatatttatttcctatttaggttatccttcaaaaattttctttgatgtggctcaagctttcttactggtgggttacacaatataacaagtttggggtcattgctatagagttcagaagtttattcacacccacaaaccctggagaatcctgtccaatctcttcaaggaattctgaatcccatgtaagaagaagaggcagtgatagaaagggagggagggagggagggaggaggaaaagagctagggagaaaacagaaagattttttttctaatattaaaatgtttttcccgaatgatcaagaatagcactatataacaaaactttctgtgatgaaaatgttctatatctgtgctgtctggtacagtagccacttgctatatgtgactattgagcacttgaaatgtggcatgggtgactgaagaactgaatattaaattttgtttaatctgaattaaagtttaaatagacacatgtggctaatgactactgtgttgcacaatgctgcagaaagtccagaaacaaacactgatgggtaagtcaacaatcgttcttgttgaataaagagttggcaaatgacccacttatatttcttttatcaataaaatagtaaaatcattgaaactttctaaatttctctccaaatattttattccaaaaaatgttattctaaaaagaaaccacaactaaacatacctaaactgtctcatgattgaaagaaaaatatgaaatgtatgaacccagcaatgtagaactgcacacgtgtcaacataaagtcagttgatgcagcgacacagagatggaataactggaatttgggttatgcaaaagtgctcttagattttctttcctatcttggtgaaagatatataatttctattgttgaaaaatggaaatgtaacttatcctgcacaatttgcctgcctatgaaggaatatactttttgccagttttatcatatttcatagtttcaagttatttttcctgtgggaagttgcgggctgggggatgtgtaccccttttctttttctttctttctttctttctttctttctttctttctttctttctttctttctttctgtctgtctttcttttttttattatactttaagttctgggatacatgtgcaaaatgtgctggtttgttacataggtatacacgtgccatggtggtttgctgcactcatcaacccgtcatctacattaggtatttctcctaatgctatgcctcctctagtcccccaccccttgacaggccctggtgtgtgatgttcccctccctgtgttcatgtgttctcattgttcagttcccacttatgagtgagaacatgtagtgtttggttttctgttcttgtgttagttcgctgagaatgatggtttccagcttcatccatgtccctgcaaaacacataaattcatccttttttatggctgcataatattcaatggggtatatgtgccacattttctttatccagtctatcactgatgggcatttgggttggttccaagcctttgctattgtgaacactgctgcagtaaacatacgtgtgcacgtgtctttatagttgaatgatttataatcctttgagtaaatacccagtaatgagattgccgggtcaaatggtatttctggttctagatccttgaggaatcgccacactgtcttccacaatggttgaaataatttacactcctgctaacagtgtaaaagcattcccatttcttcacatcctctccagcatctgttttttcctggctttttaatgattgccattctaactggcatgagatagtatctcactgtggttttgatttgcatttctgtaatgaccagtgatgatgagcttttttttcatgtttgttggctgcataaatgtcttcttttgagaagtgtctgttcatatccttcacccactttttgatgcggtggtttgttcttgtaaatttgtttaaattctttgtagattctggatattagccctttgtcagatggatagattgaaaaattttctcacattatgtaggatgccttttcactctgatgatagtttctcttgttgtgcagaagctctttagattgattagatgccatttgtcaattctggcttttgttgccattgcttttggtgttttagtcatgaagtctttgcccatgcctatgtcctgaatggtattgcctaggttttcttctagggtttttatggttttaggtcttatgtttaagtctttaatccatattgagttaatttttgtataaggtgtaaggaaagggtccagtttcagttttctgaatatggctaaccagttttcccaacaccatttattaaatagggaatccttcccccattgcttgtttttgtcaggtttgtcaaaaatcagatggttgtagatgtgtggcattacttctgaggcctctgttctgttccattggtctatatctctgttttggtactactaccatgctgttttggttattgtagccttgtagtatagtttgaagtcaggtagcgtgatgcctccagcattgttctttttgcttaggattgtcttggctatacaggctcttttttggtttcatatgaaatttaaagtagttttttctaattctgtgaagaaagttaatggtagcttgatggggatagcattgaatctataaattactttgggcagcttggccattttcatgatattgattcttcctatccatgagcatggaatgtttttccatttgattgtgtcttctcttatttctttgagcagttgtttgtaattctccttgaagaggtccttcacaacccttgtaagttggattcctagatattttattctgtttgtaggaattgtgaatgggagttcactcatgatttggctctctgtttgtctattattggggtgtaggaatgcttgagatttttgtgcatcgattttgtattctgagaatttgctgaagttgcttatcagcttaaggagatttttggctgtgtcgatggggttttctaaatatacaattgtgtcctctgcaaacagagacaatttgacttcttctcttcctatttgaataccctttatttctttctcttgcctgattgccctggccagagcttccaatactatgttgaataggagtggtgagagagggcatccttgtcttgtgttggttttcaaagggaatgcttccagcttttgcccattcagtataatattgactatgggtttgtcataaatagctcttattattttgagatatgttccatcaatacctagtttattgagagtttttagcatgaagggatgttgaattttattgaaggtcttttctgcgtctatttagatatcatatggtttttgtcattggttctgtttatatgatgaattacgtttattgatttgcatgtgttgaaccagccttgcatcccagggatgaaactgacttgatcatggtggataagctttttgatgtgctgctggatttggtttgtcagtattttattgaggattttcacgttgatgttcattggggatattggcctgaaattttctttttttgttgtgtgtctgccaggttttgatataaggatgatgctggcctcataaaatgagctagggaggagtccctctttttctattgtttggaatagtttcagatggaatggtaccagctcctcttggtaaaatttggctgtgaatccatccggtcctgggctttttttggttggtatgctattaattactgcctcaatttcagaacttgttattggtctattcagggattccacttcttgctggtttagtcttgggagggtgtatgtgtccaggaatttatcaatttcttctagatttctagtttatttgtgtaggggtgtttatagtattctctgatggtagtttgtatttctgtgggatcagtggtgatatcccctttatcattatttattgtgtctatttgattcttctttattttcttctttattagtctggctagccatctatctattgtgttaatcttttcaaaaaaccagctcctggaatcattgattttttgagggggttttcacatctctatctccttcagttctgctctgttcttagttatttcttgtcttctgctagcttttgaatttgtttgcccttgcttctgtagctcttttaattgtgatgttagattgttgattttagatcttttccgctttctcctttgggcatttagtgctataaattcccctttaaacactgctagctgtttcccagatattctggtatagtgtgtctttgttctcatcggtttcaaagaacttatttatttctgccttcatttcgttatttacccagtagtcattcaggagcaggttgttcagtttccacgtagttgtgcagttttgagtgagtttcttaatcttgagttctaatttgattgcactatgatctgggagactgttatgatttccattcttttgcatttgctgaagagtgttttacttccaattatgtgatcaattttagaataagtgcaatgtggtgctgagaagaatatatattttgttgatttggggtggagagttctgtggatgtctattaggtctgcttggtccagggctgagttcaagtcctgaatatccttgctaattttctgtctcattgatctgtctaatattgacagtggggtgttaaagtctcccattattattgtgtgggagtctaagtctctttgtaggtctctaagaacttgctttaggaatctgggtgctcctgtattgggtgaatatatatttaggatagttagctcttgttgcatcagtccctttaccattatgtaatgcccttctttgtcttttttgatctttgttggcttaaggtctgttttatcagagactaggattgcaacccttgctttttttctgctttccatttgcttggtaagtattcctccatcccttcattttgagcctatgtgtttctttgcatgtgagatgagtctcctgaatacagcacaccatttgttcttgactctttatccaatttgccagtctgtgtcttttaattggggcatttaatccatttacatttaaggttaatattcttatgtgtaaatttgatcctgtcattatgatgctagctggttattttgcctgttagttgatgcagtttcttcatagtgtcgatagtctttacaatttggtatgtttttgcagtggctggtactgatttttcctttttatatttagtgcttccttcaagggcacttgtaaagcaggcctggtggtgacaaaatctcttaccatttgcttgtctgtaaaggattttatttctcttttgcttatgaagcttagtttgactggatatgaaattctgggttgacaattcttttctttaagaatgttgaatattggcccccactctcttctgtcttgtacggtttctgccgagagatctgctgttagtctgatgggcttccccttgtgggtaacccgacctttctctctggctgcacttaacattttttctgtcatttcaaccttggtaaatctgaatattatgtgtcttggagttaatcttctcaagaagtatctctgtggtgttctctgtatttcctgaatttgaatgttggcctgtcttgctaggttggggaagttctcctggataatatcctgaagagtgttttccaacttggttccattctccctgtcactttcaggtacaccaatcaaacataggtttggtcttttcacatagtcccatatttcttggaggctttgttcattccttttcactctttttttctttaatcttgtcttctcactttatttcattaagttgatcttcaatctctgatattctttcttctgcttgatcaattcggctattgatacttgtgtatgcttcacgaagttctcgtgctgtgtttttaagctccatcaggtcatttatgttcttctctaaactgtttattccagttagcaatttgtctaaccttttttcaaggttcttaacttccttgcattgggttagaacatgctcctttagcttggaggagtttgtgattacccaccttctgaagcctacttctgtcagttcatcaaactcattccccgtccagtcttgttcccttgctggcgaggagttgtgatcctttggaggagaagaggcattctggtttttggaattttcagcctttttgcactggtttttcctcatcttcttggaattatctacccttgttctttgatgttggtgaccttcggatggagtttctgtgtggaaatcctttttgttgatgttgatgctattcctttctgtttgttagttttccttctaacaggcctctctgctgcaggtctgctggaatttgctggaggtccactccagaccctgtttggctgggtatcaccagtggaggctgcagaacagcaaagattgctgcctgttccttcctctggcagcttcttcccagaggggcacctgccagatgccagctggagctctccggtatgaggtgtctcccagtcaggaggcacgggggtcagggacccacttgaggaggcagtctgttccttagcagagctcaagtgttgtgctggcagatctgctgctatcttcagagttggcgggcaggaatgtttaagtctgctgaagctgtgcccacagctgccccttcccccaggtgctcagtgccagggagatggtagttttatctataagcccctgactggggctgctgcctttctttcagagatgacttggccagagaggaggaatctagagaggtagtatggctacagaggctttgcggagctgtggtgggctccacccagttcaaatttccaagcggctttatttacactgtgaggagaaaactgcctactcaagcctcagtaatggcagacgcacctccttccaccaagcttgagcatcccaggtggacttcagactgctgtgctggcagtgagaattttaagccagtgcatcttagcttgctggcctctgcggaggtgggatcccctgagctagaccacttggctccctggcttcagccccctttccaggggagtgaacagttctgtcttgctggcattccaggtgccactggggtatgaaaaagaactcctgcagctagcttggtgtctgcccaaatggctgcccagttttgtgcttgaaacccagggccctggtggcgtaggcacccaagggaatctcctggtctttgggttgcaaagactgtgggaaaagcatagtatctgggccgcagcacactgttcctcatggcacagtccctcacggcttcccttggctaggggagttccctgaccccttgcacttcctaggtgaggtgacaccccaccctgctttggctcaccctccgtgggctgcacccactgtctaaccagtcccaatgagatgagttgggtacctcagttggaaatgcagaaatgacctgccttctaaattgatctcgctgggagctccagaccagagctgttcccattcaaccatcttgccagccacccaacaccccttttcttttaccctggactctaggcttcttatattatcagggcaagttgggcagcttcaatctctttctcttcatggctgtacacagccacttaatttcaaattttctctttctcctttgttaaccctcctcctccaaaaaatattccctcaagtgccgacataatattccatcaatagcagacaaagtcttttgttccctaaccagtgacaaaagacttatgatgggtgggtggggggcaaggggggatgcttaatgggtatcaaaaaaatagaatgaataagacctagtatttgctagcacaacagagtgactatagtaaaaaacaatttaattgtacatttaaaaataactaaaacagtataattggattgtttgtaacacaaaggataaatgcttgaggtgatggatacctcatttaccctgatgcgattattatgcattgcatgcttgtatcaaaatatctcatgtaaccctgctactataaagacacgtgcacacgtatgtttattgcagcactattcacaatagcaaagactaggaaccaacccaaatgtctatcaataatagactggataaagaaaatgtggcacatatacaccatagaatgctatgcagccataaaaaagtatgagttcatgtcctttgcagggacatggatgaagctggaaaccatcattctcagcaaaatatcacaaggacagaaaaccggacaccacatgttctcgctcataagtgggagttgaacaatgagaacacatggacacgcggggaacatcacacactgggcctgctggggggtgggggctgggggagggatagctttaggagaaatacctaaagtaaatgacgagttgatgggtgcagcaaaccaacatggcacatgtatacctatgtaacaaacctacacgttgtgcacatataccctggaacttaaagtataataataataataaagaaaattgtcttctgaatgtccttggacatcttattttccaaagacaaaattttctggacaacagttggtactgtgagcccaagtctggttcataatgaaactcagagaatgcatagatttcttttaaaaataaatctcaagtcttgcagagatccagcttacctcctgaaaaaggtgcgttaagcacccacaccacgttatttcctatgtactaccttgtttataaaaatcactcagatatagattttgtgaattctgttttgagaatgtcccaggcttagagtccaggcaggctgacttatagttctgtgccaaccaaaaggctccatatatttagaggtatggacatccatcttcttggccatagtactctgctgaggaaaacaaatcaggaaacaaatccttcagtgggcaatgttaataagctgtggagtagttctcttgaattctgccacaggcctgacaatccatggcttctgtatacaaggtgacacataccattgtacctagaagcacagaccagccagctaactatccctggtgcatgataggatattaatgtttgttgaatgaatgaattatttaataaatacgtaatataatggctcccattgagagagcattcactatgaaaaaaatctcatgtaacccataaatatatgtgcttgctgtgtactcacaaaaattcaaaattaaaaaaagtttgtgacagaaatactagtcaacataatacaagaatctcacatatgttaaggaaaaaaaaaatcagttagtgaattgaggaggtcagctccttttctgttttgacggtataggagagatcattgaagaagggaagccattggttccctaaaaaagagggcagatggcaagagttttcttcaaaggacattgtgggaatacaggagaaccacattttccagtgtcaacaccttgcattgtaccaaatgggaagtacaagccaaaatctgtggccaggatgtttgaagctgtgggctgtgaaatttagtcgtgatgtgtctctatagagacattgtaaattctaggaggacagggaccaactacaacgtacttttcacttgccccttagtagtccccaatatggtgccaggtatgtgaagaaaaagcatctgttgaataagtgaaagaacatgacttttgaaaacccattttaatcccagagtgtttcttgaacagtgagcattctcttttccccttgaacaagtggatgagaaaatcaacaaattaaaaatctcatcttggggttgaggtttccttcaagtctttgttcctcattgatgaaaacttagcctgaagagctcttcttgtaatcctgtaacagcagctgattactaatggaaattagtgttaattatataaacactttggaaattaatacagggcacttttccatttaactcagaattttcatttgtatgaaaaagactgattatggggaaaatgaaaaaactttactgaaagatattaaggaatatttaaataaatgagataaattccatgcagataaattccatgtttatgaccaagaagatgcgatgccataaaggtgttaattttcccaaaatggagttataaattcaatgcaatgccaagaagaattccaataaggttatcctggaacctggcaagctgatttgaaaatttacatggaagagtaaaaagccaagaatagccaagacactcttttttgttttttgttttttgtgttttttttttttggacaaatagattcattcatttattgtatttattcattcaacaaatattttgggaacactcaccaagtgttaggtgctctgctagcttcaattaatagaacactgaatgctgtataagaactgtttcttattttatttcaatagttttgggggaacaggtggtttttggttacatggataagttatttaatggtaatttctgagatattggtgcacctgtcacttgaacattatacactgtgcccaatgtgtagtctcttatctctcaccctcttcccccacctgctccccctaagtcctccacatccatttcatagttctttttctttttttgtcatacaaagtttatttacagcaaatcactgactatcataacttcatatctgcaatctattagctatcaaatatcttagctacagtgagccttgatttcctcatctttaaattgggattctgcaggggataattcttaaattttgcattttatgttctcttcttgcaaaggatggaaacattctgtttatttagaattttcctccacattatttttagtgctacagtctagaaattagtctaaatacctatctattgtccattacataattcttatgcctttgtgtcctcatagcttagctcccatatataagtgagaatatgtgatacttggttttccattcttgagctacttcacttagaataatggtctccaattccatctaggttgctgtgaatgccattatttcattcctttttatggctgagtaatattccatgatgtatatataccacattttctcaatccactcattggtcaatgggcatttaggctggtcccatatttttgcaattgtgaattgtgctgccatatatgtgtgtgcaagtgtcttttttatataatgacttatttcctttgggtagatacccagtagctggattactgggtcaaatagtagttctaccttcagttctttaaggaatatccatgctgttttccatagtggttgtactagtttacattcccaccagcagtgtaaaagtgttctcttttcaccacatccaagccaacacctatttcttttatgttttaattatggccattcttgcaggagtaacgtgttatctcactgtggttttaatttgcatttccctgataattagtgacatcgagcatttttttcacatgtttgttggccatttgtatatcttcttttgataactgtctattcatgtcctttgcccacttttcaatgggattatttgtttttttcttgctgatttgttgagttccttgtagattctggatattagtcctttgtcaatgatgcatagtttgtgaatattttcttccattctgtggattgtctgtttactctactgactatttcttttgctgtgcagaagccttttagtttaagtaggtcccatctatttatttttatttttgttgcatttgcttttgggttcttcaccataaactcttttcctaagtcaatgtctggaagagtttttctaatgttatcttctagaatttttatagtttcaggtctaagatttaagtctttgatccctctttagttaattgttgtacagggtgagagatgagggtccagtttcattcttctacatgtggtttgccaattatcccaggatcatttgttgaatagggtgtccctcccccactttatgtttttgtttgcttttgtcaaagaccagttggctgtaagtatttggctttatttttggtttctttattctgtttccttggcctatgtgcttatttttatacaagtactatgctgttttggtaaccatagccttgtagtatagtttgaagtcaagtaatgtgatgcctctagatttgtttttttgcttagtcttgctttggctatgtgagccttttttttttttttttttttggttccatatgaattttaagattgttttttctagttcgtgaagaattatgatagtactttgatggaaattccatcgaatctgtacattgcttttgacagtatggtcattttgacaatattgagtctacatatccatgaacataggatgtgtttccatttgtttgggtcattgatgatttctttcagcagtgttttatagttttccttgtagagatctttcacctccttggttaggtatattcctaagtaatttttttttttttagcagctgttgtaaaagggattgagttcttgatttgtttctcagcttggtcattgttggcgtatagcagtgctactgatatgtgtacattgattttgtatcctgaaactttatcgaatttatcagatgtaggagctttttggatgagtctttaaggtttatttggtatatgatcctatctttggtgaacagcgacagtttgacttcctttttatcaatttggatgccatttatttctttctcttgtctgattgttctggctaggacttccaatactgtgttgaagacaagttttgaaagtgggcatccttgtcttgttccaattcttagggggaatgctttcaacttttcccagtttagtataatgttggctgtgggtttgtcataggtggcttttattactttgaggtatattccctgtatgccattttttgctgagggttttcatcataaaggaaagctggattttgtcaaatcctttttctgtatctattgagatgatcacatggtttttgtttttaatttcctttatgtgatgcatcgcatttattgacttgcttatgttaaatcatccctggatccctgatatgaaacccacttgatcatggtgtattctctttttgatatgttggattcatttatttagtattttgttgaggatttttgcatccatgttcatcagggatattggtctgtagttttctgttttgttttgttttttctatgtcctttcctggttttggtattagggtgatactggcttcatagaataatttaaagaggattccttctttatcttttggaatagtttcatcaagattggtaccaattcttctttgaatgtctgatagaatttagctgtgaatccatctggtcctggactttttttgttgttggcaatttaaatttgctgttttaaaattaccgtttcaatcttgctacttgttattggtgtgttcatgttttctactttttcctgacttaatctaggaggcttgtatatttccaggaatttatccatctcctctaaattttctggtttgtgcatgtaaaggtgttcatagtaaccttaaatgatcttttgtatttctgtgatatcagttgtaatatctcccatttcatttctaattgagcttatttggatcttctctcttttcttcttggttaatctcactaatggtctattaatttggtttatattttcaaagaaccagctttttgttttatttatcttttgtattttttgtttcaattttatttagttctgctctgacctttttatttcttttcttctgctgggtttgggtttggtttgttcttgtttctctagttccttgaggtatgaccttagattatctatttacactctttcagacttttttaatataggcatttaatgctatgaactttccttgtagcactgcttttgctctattccaaagattttgctaagttttgccactattatcattcagctcaaagaatttttaaattaccatcttgattttattgttaacccaaagatcattcaagagcagacttaaaagttttttatgcatttgtatagttgtgaaggttccttttggagttactttgcagttttattctactgttgtttgagaggatacttgatataattttaattttcttaaatttattgagacttgttttgtgacctattatgtggtatatcttggagaatgtcccaaatgctgatgaaaagaatgtatattctgcagttgttgggtagcatgttctgtaaatatctgttaagtccattagttctagggtatagtttaggtacattgtttctttgttgaccttctctcttgatgacctgtttagtgttgtcagtggagcattgaagtcccccactattattatgttgctgtctatcccatttcttaggtctagtagtaattgttttgtaaatttgctagctccaatgttaggtgcatatatatttaggattgtaatttttcctgttggactaatcgttttattattatgttatgtttcttgtctatttttacgttgttgctttaaagtctgttttgtctgatataagaatagctactcctgctcacttttggtttccatttgtgtggaatatctttttctacccctttaccttaagtttatgtgagtccttatgtgttagatgagtctcttgaagacagtggatacttggttggtagatttttatccattctaccatcccgtatcttttaagtggagcatttaggccatttacattcaacattactattgagacgtgaggtactattctattcatcatgctcgttgttgccttaataccttttttgtcattgtggttttttttataggccctgtgagatttatgctttaaggaggttctattttggtgtatttcaaggtttcatctcaagatttagaattccttttagcatttcttgtagtgctgacttagtagtggcaaattctctcagaatttttttgtctgaaaaatactttatctctccttcatttatgaagcttagttttgatggatacaaaattcttggctagcaattattttatttcaaaaggctaatgatgggaccctgatcccttctggcttgtaagatttctgctgagaaatctgctgttaatctggtaagttttcctttgtaggctacttgatgcttttgtctcacagctctaaagattctttcctttgtcttgactttaggtaaccctatgaccatgtgcctaggtgacgatctttttgtgatgaatttcccagatgttctttgagcttctcatacttgaatgtctagatctctagcaaggccagggaagttttcctcaattattccctcaaataagttttccaaacttttaggtttctctttttcctcagggacaccaatcattcttaggtttggccatttaacataatccctaatttcttggaagctatttttttttttttcatttttctttgtcattgtctaatttgaaagccttttcttcaagctctaaagttctttcttctacttgttctagtatattgtcgaaactttccactccattttgtatttctctaactgtgtctttcatttctagaagttgtgattgtttttttctttatcatatatatttctaaggagaatttttcatccatatactgtatgtttttttaatttcttttaattgattttcacctttctctgatatctccttgaggagcttaataatcaaccttctgaattctttacctggcaattcagagatttctttttggtttggatctactgctggggagctggtgtgatcttgtgagagtgttacagaaccttgttttgtcatattaccggaactacttttctggttccttttcatctaggaagactatttcagtggaatggtctccaaatcaagacctgctgtttagattatcttgtcttgtggggcaatcccttgatgtggtgttctcctctttcccctaggaatggggcttcctgagagctggactgcagtgattgttattgttcttctgggtctagtggggctggtagtggggctaccaggatctgggctggtactagggaatgtctgcaaagagtcctttgatgtgatccaacttcaggtctctcagccatggatacaagcacctgttctggtgaaggtggcagggaagtgaagtatactctgtgagtccttggttgtagaaagatttagtctgctagctttctcagatactggttatgctagcagtgaagttgtcatgtggacacactcaggacctctggttagccaggatgctgcaggtggtggaattaattgttgtcttctccttcctgggatcaggattattcagtcatgagttgctgtgatggtccgtgtttgttggcctccagccaggaggtggcattttgaagagtgtaccagctgcagtagtagtagggggatctaagcttgccctaagttggccaggataaatattttggtttctcaggtgatgggtggggccataaagctcccaagagtttctttcttttttctttttcttttttttctttcttttcttttcttttttttttcttttttttttttttttgtgacagtcttgcactgtcgcctgggctggttcagaagcatgtagtttaatgtccatgtatttgtgtgttttccaagactccttctgttattgatttctagttttatttctattatggttagaaaagatacttgatattatttcagtcttttaaagtttgttaagacttgtttgtggcctaacatatgatctagcctagagaattctttgtaggtgctagagaagaatgtgcattcttttgcagttggatagagagttctatatatgtctgttagatccatctggtctaaagtgttgttcaaatccgctatttccctattgattttctgtctggatgatctgttcactgttgaaagtggagtatttaactctcctagtattgttatattgtagtctatctcatccttcagatctattaatattgctttatatgtttatgtgctccaatgttaggtgcatatatatttaaagttgttatgtcctctttatgaatgaatacctttatcatagtataataaccttcttcatctctttatacagtttttgacttaaagtttattttgtctgatacaaatatagccacccctgctcttttttggttaccatttgactgaactatcttttgtcatcctttcactctcaaactatgtgtgtctttaagattaaaatgaatctcttacaggcagcatattattggatcttaattcatccggccactctgtgtcttttaattggagaatttaacctatttacatataaagtggttattgataggtaagaacttgctactggcattttgttaattttttactagctagtttatatttctcttattcctcacttccaatcactttctttgcaatttgttgtatttttatagtggtatgacttgattcttttctctttatttcatttttatttttgagacagagtcttgctcagtggcccaggctggagtgcagtggcacgatctcagctcactgcaatatccacctcctgggttcaagcaattcttgtgcctcagcctcccaagaagctgggattacaggcatgtgccaccacacctggctagttttcgtatttttgttttttttttagtagaaacgggtttcaccatgtttgccaggctggtcttgaactcccggcctcaagcaatcctcccatcttggcctgccaaactgttgggattacaggtgtgagccaccatgcctggccttctctttattttttaacatcttatagttataatgtcctaatttaagctaatagttccttaacttcagtagcatacaaaggctctacaattatacttctccttctccccacattttatgctattagtatcatctatttatattatgtattcattaaccaatttttttacagctctagttttttaaatcaatttgtcttttaactttttaaattaatttgtctagaattatgactgattcatatttcccttacagtattcagaatttgagtatgtttacctttaccagtgagtttcatactttcatatgttttcatagttatccttttatttcaaataactccttttagcatttcttgtaaggcaggtcttgtgttgataaacttcttcaggttttgtaagtcttggaatatttgtatctctccttcatttctttttttcctcttcctttcttttagagacaggggctcattctgtcaccctggctagagggcagtggtgcaatcatagctcattgcaacctcaaacacctgggttcaagctatcctcctgcctcagcctcttgaatagctaggactgcagctgtgcaccaccatggctggctaattttaaaattattttttgcagagacaaggttttactatgttgcccaggctggtcttgaattcctggacgcaagcaattctcttacctcccaaagtacaggaccacaattggcaggactgcagcctgggtgtgtgtctgcagtttcaaaatgaccctctcaggttttgagcttcatcaagattttataacctctacctaaatcccatggttcctgcgaaaagacttttgtctgcggataggtggagaattgttgtggtttgtggggggatgtgagcgagtgacttcttattccattatcttggtaatatcacttcctatttctttaagtgctaggtagaattcagctatgaaacccttcaaatctgggcttttctttgttaggaagtttttgattaccgattcagtctccttactagttattggtctgtttagatttttctatttcctcatgattttgtctggtaggttgtacattttctggaatgtatcaatttcttctaggttattcaatttgctggtgtaaagaatatctatacctgtaatggaatagtcttcatctataaaaaagaagaaaatcctgccatttgcagcaacatggaaaaacctggagaatagtacactaaacggaataagccagacatagaaagacaaatattgtatgatctcacttacatgtgaaatctaaaagtcaaacttatataagcaaagagtaggactgtggtttccaggggcagggaggtatgaaaaatgggaagatgttgatcaaggggtataaacttgaagttataaggtgaataaattctgttgatctaatgtacagcgtggtgactatagttgtattgtttgcttgaaatatgataaaagagcagtttttatgtgccttcacaacacacacacacacacacaaaatgcacacatacacatagtaactctaggtggtgatggatatgttaagtagtttgattgtggtaagcattacacaatgtatacatacatcaaatcatgctgtacacctggtatatatacaatttttatttgtcaatcaaatatttaaaaagaaaagaaaagaaaagcaggaggatttctgcttctgggaagatgtagatgtacttttcccaaggaatgataggaggtgagttctctgtcctggttttgtttgttttttgcttcatacatctcagactggaaggcaaagaagctagcagcctggaaatgtcaatggatgcagacagaaaaaaaaagtccaagtgaagtctgctctctccagccaaaggaccaggaaagcttagaaatacagacatattttagagaataactgttctactctagccaaacaccacaaaaagtatggccccattcccagccctgccaacaaatgttgagtggagggcctacactttcagccttgccaggctataaaatgactccccatacctcctggacaagatgctgtcagaatagattgagtaggtagcccagactttcctctccactgggaaataatgaggtgattctttataccacagcgtcaatggaaagcacttggaaagcctgggtacctcctccacctggcagtaataaggctgccctccccttatcaggtatcagtagagatcaggtggggaatctggccttctacccacaggtaaaagtaatgaggcggcgctcttctcctcttccctgctggagcagcgtcagaagccaactaaaacaggagttttaaataagacccagagtttcaaaatgttcagatttcagtagaaaaatcactcatcatgccaagaccaagaatgacccgaagctgaattttaaaaagacaatcaattagccaggcgcagtggctcatgtctgtaaccccagcactttgggaagcccaggagggtggattacttgaggacaggagttcgagaccagcctggccaacatggcgaaaccccatctcaactaaaaaaaaaaaattgcagaaattaacagggcgtggtggtgcgcgactgtaatcccagccactagggaggctgaagcaggagaatcgcttgagcctgggaggtggaggttccagtgagctgagattatgccactgcactccagcctgggtgatagagtgagactccatctcaaagaaaaaagacaatcaattgatgcctacactgagattatagagatattaaaatgatctgacaaagattttaaagcagtcattagacaaatgcttcagtaagcaattatgaacgtacttaaaaaaggtttttaaaaaagattttagaaaagaaatagaatatataaaaaagaaccaaatagagatttcagaagtgaaaatacaataatcagaataaaaaactcagtggatgggtttaacatctgaatagaggggagagatgaaagaatcgtaaatgatctggaagatagaacaacagaaatgacccaatctgaacaaaagagagaaaatagacttaaaaacttagaaactcagagacttgtatgattataacaaaataggtaacatttatgtcactggagtaccagaaataaaggaaaaagtgagtggggctgaaaaagtaaatgaagaagtaatgactgaaaacttcctaaggttgccaaaagacataaacctataaattcaagtttaagtaaaccccagacaggataaactcaaagaaattcacactaagacacattataagcaagcttctgaaaactaaatataaagaaaataatcttggaaagcagcaagagagaaattacaccttacgtacagaggaaaaacccattatgacagatttctcattaaaaaaaacatgcaagtcaagaggaagtgatacaatatttttcaattactgaaagaaaagaaatgtcaacacagaatcctacatccagtgaaaacttacttccaaaatgaagggaaaaccaaagcattctcagatagaagaaaaaaaaaaaaagagaatttgtcactagcagacctaccctaaaagaatgctaaatcagttatctaaacagaaataaaatgataaaatagaaatcacggtatattgggggaaagaaaacaaggtaagcaaaagtgtagataattacaatagactttcattcttctcttgagttttaaaaattttatttgacatttgaagcaaaaattataacactatctgatgtggttctaaatgtacatagtgcaaatatttaatttttaccctctctaatgataattatattgtattatcattagggagggtaaaaagacatgaattatcattagggagggtaaagagacatgaagggaggtaaggttactacatttcactggaactggtaaaatgatagctgtgataaattatgtatatataatataatacctagaggaacactaaaaaattgattcaaagtgatacacccaaagccactataggtaaatcaaaacagaattctaaaaaatgtccaagtaacatacagaaagatagcaatatatcaaaagaattatacaccaagcggagtttactccaggagcacaaagctagttcaatgtttgaaatcagtattaaccaccataggctggatgtagtggcatgcgttcatagtcccagctactgaagaggctgaggtgggaggatctcttaagcctaagaatttgagtctagcctgggcaacatagcaagctctcatctcaaaaaacaaaatcgaccaccgtattaacaggttaaagaagaaaagccatatgatcatatcaattaatgcagaagtattagataaaattcaacactcattcatgataaaaactcttagaaaaatagtaatagaggggaactttctcaacttaataaaaagcatctataaaaacctagagctaacattacacttaatgatgaaagactgaatgctttcttcataagactgggaataaggcaaggatgtgtgctctcaccagtcttattaaacatagtgctagaagttctagccagagcaataaagcaaggaaaggaaataaatgacattcaaaaccagaaagaagaaataaaatgatctcaattttcagataacgtgatggctttcttcagaaatcacaaggaatatacaaagatactcttgaaactaataagtgagtttagcaaggttgcaggatacaagagaaatatacaaaaatcagcagcatttctatatactagcaattaacatgtgggtaccagaatggtaccaatgccatttacaatccctcaaaaaatgcttaggtggaaacctaacaaaacatgtacaagacttgtatgctgagaactagacaacattgcccaaagaagagttctatacaaatggacatattatattcatagtttggaaggctcaacagagtgaaggtgttaatcctccttaaattgaaaggtttaacacaattcttatcaaaatccatgaaggattttaaaaaatagatatagataagtttattctaaattttatataaaaggacaaaagaactaaaatatctcaaacagttctgaaaatgaaaaataaaacagtaagaaacagtctacctgattccaaggtatcttagtcagtttgggatgctattacaaagtatcatagactgggtggcttataaacaacaaacatttatttctcatggttctggatgctgtacatctgagatcagggtgtcaccatgactctgctctggtgagggccctcttcctagttgcagactgctatcttctcactgtactttcccatggtggaaagagggcaagagagctctctggggtaccttttatagggcactaacacattcatgagggcttcgtcctcatgacttatctcccaaagccctcacctcctcataccattacactggaggttaggatttcaacatgaattttggcgggtacacaagcattccatatgttgcagaaagcttactgtgtaattacagttaattaagactatgtcatattggtagagagataaacatatagatcaatggagcagaatagggaactcagaaataaccccaaacagttagagtcaagtgatttttaacaatgatccaaaagcaatttaacagaggaaggaaagcctttttaataaatagtgctggagtaattggacgtccataggcacaaaataagccttgaccaaagtcttacatctaacacaaaaatgaactcaaatagatcatgtaaatgtaaaatgcaaaactatataattttagagaaaaaggagaaaatattgtgaattcagagctagacttgataccaaaaatacaatctataaagttaaaaattgataaattttacctctttgaaattaataacttttgctctgcaaaagacctgttaagagtatgaaaagacaaactagaaactagaagaaaataattgcaaaacaacatacctagcaaaggattaatatctagaaaatataaagaactatcaatcacaacagtaaaacaaaacccaaaaaatcctattagaaaataggaaaaagacatgaaggaacatttcaccaaagaggacctacaaataagaggataacaaatttcatttcaccaaagaggataacaaataagacaagaaaacgtgttaaacgtcagtaccaatggtgttgcagtagataacgcagtagacgatgtcagttactacatatctatcagaatgcttaaaatagtgatgacaccaaatactggtgaggatttggagagactagatcattcagacattgctattgggaatataaagtagtatattcactatggaaagcagtttggccagttttctgaaatctaaatactaaactagcacacaacctagtaattgcactcctgggcatttatgagaaatgagcacttatgttcataccaaaacctgtacacaaatgttcacagaaggtttctttgtaatagtcctaagctgaaaacaaccctgatgtccttcaattaaaggcttaaacaagccgtggtacattcatgccatgaatacttctcagagtaaaaaggggtagcaattcaagaaacaacagatgctggcaaggttggagaggaacaggaatgcttttacactgttgacaggaatgtaaattagtccaaccattgtggaagacagtgtggcgattcctcaaagatctagaatcagaaatactatttgacccagcaatcccattactggatatacacccaaaggaatataaatcattctattatgaaggtacatgcatgtgtatgttcattgcagcactactcacaatagcaaagacatggaatcgacccaaatgcctgtcaatgatagactggataaagaaaatatggtacatatacaccatggaatactatgcagccataaaaaggaatgaggtcatgtcctttgcagggacatggatggagcttgaagccattatcctgcaaactaatgcaggaacagaaaaccaaacaccacttgttctcacttacaagtgggagctgaacaatgagaacacatggacactggtgtagggggcacaacccacactggggcttgtgtgggggtgggggagggagagcatcaggaaaaatagctaatgcatgctgggtttaatacctaggtgatgggttgatctctgcagcaaaccaccatggcacacgtttacctttgtaacaaacctgcacaccctgcacatacactgagaacttaaaagttgaaaaaaaaaaaaaaagggtgacaattgatacactacaatggcctggatgaatctccagagaattatgccaagtgaaaaaagccaatcctaagaagtgacatactgtacaattctacttacatagcattcttgaaatgacaaaattgtagaatagattagtggttttcagggattaaagcgggggtaaggatggaaggaatgtgggtgggcctataaaagggcaccatgagggattcttgtggtggtgaaatgttctgtatcttgactgtatcaatgtcaatatcctgattgtgatattgtactatagtttttcaaaatgttattatagggtgaaaccagctaaaggatatattgaatctatcattccttgcaacttcatgtgaatctacaattatttcaatataaaaatttaatttaaaaagccgtgttggccgggcgcggtagcatacacctgtaatcccagcactttgggaagtcaagtgggggcagatcacctgaggttaggagttcaagaccagcctgccaacatggcgaaaccccatctctactaaaaatagaaatattagctgggtgtggtggcatgcgcctgtaataccagctactagggaagctgaggcaggagaatctcttgaaccagggaggcggaggttgcagtgagctgagattgtgccattgcactccagccagggctacagggcgagactccgtctcaaaaaataaataaataaataaatttaaataaaaagcagtgccattatctattttaaaatatttttaactctgtatttaattgccttgaacctataggtaatgttacacaaatgcaaagtacagtgttttttttttatttttttgagacagagtctcacactgtcacccaggctggagtgcagtggcttgatctcagctcactgcaacctccacccaccaccggttcaagtgattctcctgcctcagcctccggagtagctgggactacaggcacgtgccaccatgcccagctaatcttttttgaatttttagtagagacggggtttcacaatgttggccaagttggtctcgatctcttgacctcatgatccacctgcctcagcctcccaaagttctgggattacaggtgtgagccactggcacccagcacccccactttttttttctttctttttacttgacccatctttacccacatcacccccaccattaattgtttttaaagccttctatggcaaaaatgagtggtagaccattttagtaaataaacgacagattttgaaaaatatcagtaatgcagatggcagagttaatagctttaatgttaaaagagattttacagattcacgagggaaagaccaattacccaatggaaaaaaaaatggacaagatttgaagagatgattcacagaagagcaaattcaaatggtcaatctacatgtgacaaactcaccagcagcagagaaatgcaaattgaagtaacaatgaatattatgttatacccatgagacttgcaaaaaaaagagaaaaaaggatatcacttgcagggatgggagggcagaaggcagtttcgcttcttgctatggaaaatgtgaattataaatagcaatctggcaacatcttttataaattcattgaaccatgcatgtaaaaattgtgcactttgctgtttgtaaattatatctgaataaaagtaaacaaaaattaaaaaaatacatctacccttgctgcagtagtaccgtcttggaaatctatcccaggaactaaaaccactgtcaatgcataaagacattgatacagagatacttattacaacattgtttattgtgctgaaagaaatagagaataaagaatgtccgtaaatggaggcatgcttgaatatggtataaccacatcatgggatattatgcagccattaaaaatatatcagttacaccgatgacttggaggcattttcccaagcattgttgagtaagaaaagctagctgtagaaaagcatgaataacgtggttccatttttataaagtaattgctaaggaatgctgtacatacgtgtatgtgtctgtttatatatgcacatgtatatgttattgaatttcttttcccacactcattaacagttgagaggattatcaagttcagcctcccagagagagtaaagatttatccagacatgcttccatttcccgtactgtgcatatatatataccaactgcatttggggacctggagaagtagccccactggcccatcagtatactctctaggcttgcaggattcacgagttaaggaaacatcctttggaagcacacttttggttaacaccacccacttccttgtggattaactgtgacagtttcagtgacataatatcacccacaaacagcagaggactcaaatggaatcatgttgctaaattgtctacccaccactctctcctcctggtaactgttttcactgtttctttatgtagccacctcctttctcaacctcacttaaaaggtatttcgtttctatttaaagttgttttcaaatgttttgaatatgctggggaaataatataataagtacatgcaacgtctgttgagtctggcacatggtgagtgttatacacattaggctctgataggcagttggaggaggggcacacaggggagaggaagaagcagaaagaggccaaaagctggaaccactgttgtggaaggaggagatgctccctatccctttcccacagtcctctcaggctgacggtgctcttccttgcgttttattcttatggggaggcctgggaacagaggccaactttctcttccccttagggagaacactgttaatatcaggaaaataaaaagattatttacattaaaaataattcaaaattattataaaattaattaaagtaccactgcacacctataagaatggccaaaacccagaactctgacaacatcaaatgggggcaacattgtggagccaacaggaactctcattcattgctggtggaaatgcaaaatggtacagccactttggatgacagttcggcagcttattgcaaaatgaaacatactcttaccataggatccagcaatcgcactccctgttatctacctaaaggaggtaaaaaattatgtccacacttaattatgcctgtggatgtttatagcagcttgattcataatttccaaaacttggaagcaaccaagatgtccttcagtatgtaaatggataaataaactgtggtacatccagacaattaaatattattcattgcttaaaaaaaaagaggagctataaagcaatgaaaagacatggaggaaacttaaatgcatattattagaagccaatttgaaaaggctgattccaattatatgacattctggaaaaggatcacagggtaggttcatgtttaattttagcagagtttgccagtcttccaaagaggttgtactgctttatgctttcatatataagagttctggttgctctccagcctcaccaatacttgatctcatcagtctttaattttagccattctggagggtgtgtagacgtatctcactgtagttttaatttgctgtcccctgataagtagtgatgtagagcaccttgggaagcatcctaatatagaatgtctttgaatgaccagacatctacattttcttgtctctttttttgtccagatgattcattttagaatatctctttgagctagcctccagaattgtactacctacaattcagaattaaggaagacctgtaagataagttggcactcctgatatcttccacctcccactggtccccaactttagggatgtgagtgatgaattaaaatgagcaaggaatcattagtaggaaagttgagaatttatagaacaaagacttagaaacttggagagctcgaataatacatccgtggatagaggcttggacataggaaggatcctgagagctagctgtgagatccagtattgtactcatagtttttttttttttatgtacagcacatagacaattttcaaaagactcttcccccataaggtttgccatcaaattaattggcttaattagtgtttctaaaggaatgggaaagaggtcaagatagtaaaaccaacaaatcctttaccttagtacatctcatattgtaatgtgcacaggaatcacctggggatctcgttaaactgaagatcctgattctgcagtctgaggggagaatctgcagctctaacaagctctcaggtgatgctgatgctgctggtctgcagaatacactttgagtagcaagagtctaaaatcatttatatatggcatttaaaatgtttttcttaaggaagatctcactagggaacttctcagatccaaacatttttatttgctttcaattctttttttttttttttgttacatttggctaataatgccctcatagctctgatcatatttaatcatggttagttgttgttttagtttgtgttgctgtaaaggaatacctgaggctgggtaagttatgcaaagaaagtcttatctggctcatgattctgctggctgaaagtttgggcatctgatgaaagcctaggctgcttcccctcatggtggaaggtgaaggggagctgggcatgtgcagagatcacatggtgagagaggaagcaagagagagcaggggagatgccaggctctttttaacaacaagtcctctcaggaactcatagaaggagaactcacccacccttgcccccagggagggcattaatctgttcacgagggatctgtcctcctgacccaaacatctcacattaggtctcaccttcaacactgaggatcaaatttcaacatgaggtctggaggggacaaatattcaaacgacatcaagttgttaaatgtcagcttaccacatcacgctgaattcattgtttataggtactgtgtctcattaaattttgtacccctagcacttcattcttggtaggaatttaacaagacgtttgggttaatacggggccaattaaatacattgtggttgatccatacaacagaatattatgtagcattaaattaaaaaggcagatctatacgcattgctgctggaagaggttcaacttgcccagcctggggataacatggaagttagcaagaacttcctggaagtcaattcttaaggatgagtagccagggaaataagagggaatttctgggaagtcatggagaagaaagtgtatatcatcagctttgtggtgaagattgttcacccgtgcatgggagacagcaggagaatactttcatggagaaataaagcaatgggcacaagaccccagagcaccacagggcagggtagagagactgagatgtggctggagtcacatggagtccccagagggatgctgtctgtgtcccgcagcctctcatgcttcccatactgcagtgcactccactgtcccctgactactgccctctcgtttcacccctctgtaggctgtgaggcccacagtttccatccggtgttgaaaaatatcctgtgttgggggtgaaaattaccgcttcttcatctttaattctcttatttgtgtttgtaacgggcattatatttcaaggccacagaactcggagttgcaaaatggaagtttcctttgttttctaaaagaatttaatcatcttgaacctctgtagctgacaccgttgatggcccacaatgtttcctcagcattcattattccagtatatgctaaccctgtggcttcttactgtacctccttgcctgagggctttctctggctactcctgatgggtggggtgggctggaaggaccagagagttaaccaggaagcagacttagctaatgactgacccagcttcttcgttcctattgatggtgggtgagaattccaagggatgctctgtgcagtctcccagaggtctcacagactatgtcccaggtgcccacagcagtatctgcccagcctttacgggctgactttatgcctcacttccccactcccttgctagtattttctgagactacttcccaaataagccgcttgcactcaaatctttgcctcacagtctgcttctggggtaacccaaaccgagacagccccccctttctaccagaatacctaatgcttaattcagtcacttcaggcaaatgtagctatttgcagatttttcagtcatttcacatgtaaactcagtcagctaggagtttcttccctgcctttgttatgtataaccagaattctgggggccagaggaggacaagggttgtggtgttcacatgtaggatgtagacggatttttgcttattttccagttttcactgtggcaccttggttgtgcccagtgcctccactttgttctctctggggaaagtcctcccatatttggatggtaccgaggaggagaatctgggtgtctatttgctttgtaaccagactctcgacctcattctcttttcagcatcaccttctgttatgatgccaatgcctgaaactttcaggggttctgctgagcaaagggggttgcttcttgaatttcctcactactagccttgaattccactttctcaagtctactaattcagctatccctcttgctactgctaccaagcttccaaaacatggtggctggtgctgcctctctcgctacctttatttttgtggttatgccttttaaaaagttttggccaggtgtaatgactcacacctgtcatctcagcactttgagaggataaggcgggtggatcacttgaggccaggagtttaagaccagcctggccaacatggtgaaaccctgtctctaccaaaaaatacaaaaattagccaggtacagtggcacatacctatagtcccagctactcgggaggctgaggcatgagaatcccttgaaccagggaggtgaaggttgcagtgagccaagagcacaccactgcactccagcctgggtgacagagtgagactctgtctcaaaaaaaaaaaaaaaagtgttgtttgggaagggttaggtaataatttgtgtgttcagtccattagtttaagttgaactgacttcctcttaccaaatagttttaaaactgtccaatctggaagttggcaatgttcacagagtgggtccccatctcacagaatgctgattgtcagtcctggtcgggccttcagaatcccctgtgaacttattgaaacacaaagacagttgggccccattcccagacgttctgatttcaagcctggagtgggacctgggaatctgtgttttaatatgctctacaaatgatgcttgcaggttattgcagtagagaaactccctgcagtagagaaactccatggagtagagaactccatgacagatgatcaaccggaccttagatcttcattggcaggctgtgcaaataattagatgattctgaacattaggaagtgattcaatatatgtaactcaaatctgtattcagggaacctctgtctttctcccaacttctactccttaagactatgccccacatgcatgattactatttgtgtgactgagggcagctactatttccatttctccctttgggctgttcttttctttggtggactcttctactgcttcttcctagagcatgtttttcagacccttcaccatcctgggtagctatttctggcaattaacttcggtttataaacatcctgtgtgaaaatgtggtgttgcaaatggaaccaaatattcttagtgtctgaatttcagagtacagggtagttgttatgtctctagagtcagattttgcatacatgaatgtggtcattgattatactgttttgtttgtttgtttttaaagcctgttgttactgatggttcagtttattgttggaaccagatcctttcccccagtgagatcttacagatcttttaagtcaggtctccaactgctgcactcaataatgaactttctaacaatgtgtcaaatgaattactagatgaatgagtgaataaatgaaccttaacaggaagctgaagtggcttttcttgatctcataggattctggtgaagtcctaaaggtgaggatggtaggtgaaagttaccctcactttccaaagggaggtactaaaatggacaaggcaagatgtggttacctcattccaaagagaggtaccagacacccctatgccagacttaatggaaaataatagaaaaggttcaacagccatcaaccccttctcctacctccagtcttcatgagaagactactgtaaatatttgaaataattattagagaggcatggggaaaggaaaactcagcccagtgtgggatgctgtgatgtctcctctcttttctccatgtttatttccatgctggccctgcatatttcttatttcctggcttgtggcctgctgagatgcagaatcctgtggtcccatcttggtgtagccacagggaagatgaaggtgagagatcttgggagaggttggacctgaggcactcatgtgaaacaaggtctgcgacccacattttaccagctatgctgaaagaatgttagctggcacttcctggaatggcagggtaaggaggtgaggacttcttgcatttggtgtggctgggatgggtgagtggatactataggtgatcaccaggtttaagtggtcttgatgggagcttgcccaagaggtgaggcgactccagcaggaagaaggcttgggatggactgttgtgccaagaattggaaagaaggaagcacctgaggttatgcagaaagtacattgcccacagcagagaactgcacggtatggaggcttgtgtggagacacttccaaaggccccaccaatgcaccccaccaggagacaggctgaaaacctgccgtacactgaaggccactccagccaaaggcaaaccacaaccatagtattaacctagtttaactattttctctaatccctctttctcctgctttgtcccagaggagggaagaagtaaaggaagagcagaagaacaactcacagtccttcctcattgcaaagccatgagccatagattaggcatgaactagaaggagaattgatgtttcaaattgcatacgaggtggtagtttcgatttgaacttgacagaacctgcttttcagtagctaagaaatgaatcaatgtcagaatgagactgttctatttttttttttttttttgagacagtgtcttactctttttcccagactggagtgcagtggggtgattacagccttgaaatcccgggctcaagtgatcctctcacctcagcctcccgagtagctaggactacaggtgtgcaccaccatgcccgactaatttttaaatttttagtagagacagggtctcactgtgttgcccaggctggtcttgaactcctggcctcaagtaattcccttgcttcggactctcaaagtgctgggattacaggtgtgagccctgacacccagccagaatgagactattcttattgaaagtgatcaatctgtctcagatgttttctaagcgtagaaacaattttgaagaaagggttggaggaacaaatgcggctgtttgcatgaatagatgcagctgtttcctttggacctccgcaagctcagctgagcctgtgggtaatttaatattgaatgaatgagtgactggtgataacggattcttatcattgtgtacttccaatcccagagagctgctagtttattggacttctgaagtccttgtggtcaaatcagccattcattccttcatttattaatccaattttaaattgggctaggcccttggattcctaaatgagtgaaccaggcccttgacaaccaggagcttgcctggctcttggaggaggagaggattctattgagctctgagggatggttcaggcctgggctgggagagaagaggagatgtccattcaggatgggagtgctgtctcttggacgttgggcatcctgacgtcctgctctgaccctggcttgctcattcatttattcattcattcattcatctaagaaataagtattgagcacctacctactttcagggtaatctgcttggcatctttcttagagtggcattcccaatgggcagattttccagcatggcaagtctgtttctcactttcttagaaattcatatggcaaagaagtggtgtgggttagaagttttggaatttctagtttcaaactatttacatctctgacttccccagttgctccctagtcctctgttgacttcagactgaacctctgaactggaaatcaggagagggttcaagtggttctcccgcctcagcctgcagagtagctgggactacaggcacatgccaccatacctggctaattttttgtatttttttgtagagatggggtttcaccgtgctagccaggatggtctcgatttcctgacttcatgttccacccgcctcggcctcccaaagtgctgggattacaggtgtgagccactgcgcccggccattttaacttgtaagtctggcagccctactgtcagggaaagcctctctctggcctgagaaaggccgtgagtttaatctcttgggtttttaggaggcctcttcccctacaaatcttccaaccatggcagtcagggcctggctagaacctgctgttgactctcctcaccttgcccttgtagggtgcagagaacgtggactgccccatgtgaactgaagatcaggagatctgaattccagatcatagtctgccagcgaggtcacagaacacgttgctggcagactctgggcctgattttcctatttagagaccattgaggattctatggactgttcaaatatcatacatggatttagctttggagggcaaccgggacaggaacatttgtccatgtgtcctctgtgtacccatccagtgtactctctctctctctctctctctctctctctctctctctgtgtgtgtgtatgtgtgcttgtgcgtgctaggggatggaagagagatgccaaactgcctgagatgatgcaagaaatggcctgttaagagccacctgccatgctttttttgattttgtacaactcctgtactgacagtggcagtcggtgggggagagtagttgggagttgccccatttttttctcagttcaacttccccagaatgactccccacaacctttctcactcccaggagaaaacgcaggttctttcttctgtccttggaataaagcaggctggtaaaaaggaacaaagacacaatggcaggttgttgagctgagcttgaaagggctcagcggcagggggcctggcttcggctccaggtgcctgggcccaggtcatcccatctgggaagctgctcctggctattcatttgttcagtatcattctgaaacacaaggcaaggaggagaggcagagctacagagaatctgaggagaagcccgaaaaataattgcaacaagggaagagagaagtatatcctgtcaaatgctgctttggtacctaactctgagatcacagacatttggcaggacagagaagaagacactaattggaaggggttgggtaaaactcacacaagggctggcaaagaaaccagcacattctcagaactgcctagaaagacagaacaccactttgggaggccaaggtgggcggatcacctgaagtcgggagttcgagaccagcctgaccaacatggagaaaccctgtctctactaaaaatacaaaattagccaggtgtggtggtgcatacctgtaatcccaggtactcaggaggctgaggcaggagaatcacttgaacccgggaggcagaggttgcagtgagccaagatcgcaccattgtactccagcctgggcgacaagagtgaaactccgtctcaaaaaaaaagaaagaaagaaagaaagaacaccaggagagaccagccatctgttgccctgatgcagaacaatcttggctcttggttttaagagagaagttggtatgtgttgctgtgacagtctgtttgcactgctataacaaaataccacagactgggtaatttataaacaatagaaacgtatttctcataactctgtaggctggaagtccaagattaaggtgacagtgggtccaagtgtctggtgaagggctggtctctgattctaagatgatgccttgaacattgcatccccctacatggtggaagagcagaagaaaagaaacccattccttcaagcttttttataagggttcaaatcccatccatgaaggatcttcccgcctggcttaatcacctcctaaagggcccaactcttaatattatcatgggcaattcagtttcaacctgtgaaatttgggaaacaagtgcagaccacagcagtggtggacactgctgttgtgccactcggctcccctgagattccttttaccatccctctgggggtatcctctgctccgtgtactttgttgctaacactggcacctgtgccttttggaagatcgtcttggccagtggagccaccttgcctaactgtgagccagaggagccttggagtttcatgccctctcccgagccttctcccttcctagcccaggaccggtgtgagcatgcagaagctcagcacctgaggtgagacagagtccgagtgttatatatattccagagctcaccatgggatcaggctgaggctggggctccacccgaaatacaccccatccttggcttcttccccttctgtatcctgctttccccgctttcttactgatttctccttcattaattagttatcttattatttctcaattgaccacttacacctgaatccctgccttaggatcagattctgatgtgattatgatagtggggaaaccccaggaaggcatttcagttaacacctcaggtgctcaggaaggagaacagcttcaactggtcatgccccagagcagaactgtcatttagaaaagaccgcagatctctggtggaggaggaggggtgaatgttaggagtaggggctcctagaggtcagcatcatcatctccaatgtttgtgtcttcacttggcgatctttgaagacatttacatgggagacccttgatttactccacaagagcatgtgttttagactcacgcagatctgagttcatgtcccacttttaaaagattgtatttatttaaggtatacaacatgatgttttgatataaatatacatagtgaaaagatgactacagttaagcaaattaacagatacatcttttcacatggctaccttttctttttgtgtggtaagaacatctgaaatctactctcagcaaatttccagtctacaacacaacattattaacagcagtcaccttgctgtagttagcgctctaggctttttcatcctatataatggcaactttgtgccctttgacctgcatcacccatttcttccctctctccaccccaggtggtctctactccacgctctatttctgtgtattcacatgtcccacttctgacccttactggcggtatgacctaaggcaagttactcaacctctctgagccttagtttcctcatctgtaaaatgggactaatagtggttcacatctcagagggcagttgagagggttacatgtgcccgctgtggtaaacatgttggttctggtccctgagtctcagtgttaacataaaatagaggcccaggatgtcttttatcaggaagtctttccaaagtgggacatgccaactgataaatgatgcagctggcccatgatttttgcaagagttgttatggcaaccatatttttaagtcacaaaattggcaaagaacgtgaaattgggactatgtgacaacaagaagtgatgggttgacataaatagacctacaaaagagaagtagtagcagcaattaagaatatgagaagcaggtacagaaacacatattaaggataggatagttgtatgtgaccaagtgggggttagaaacctgtccctggtctggacagaagaagaggtgtgagtttggaataagcatttttacacagtctctcagggttgcctgagccattttgcttcttgttgggcaccccctggaatgagagaacagactgtctcccaagcgattcacttcactctcccaagcgattggacaggggtcttgtcttgggcttcttattcctgtggtcctcctcccttttgctgtgtcccacctgcctgtgtctccactggcagcttcctgggggagacatgactctctgttctctttccataagttcccagtaactccgggtatcagagaagtgccaggaatccctcctctccactttcccctctgaggaatgggaggatatcagagtcacggtctcacttgcagctgagtggttggaatagacatttagcaatttgcatcatcagagtcatgatgccaggtggacaccttgtgaagtacttaagagaagctcccctatcaggaggacaggagagtcggagtctgggctcaatagggcaaaagctattatgattgtaggagaaatgaagggcctgccatgagaggggtcggctgcttgttctgtttccatccacctccacggatgcatccccagaccttctctgtaccccagaggttgaccctgtgaatgtcacttttgaggctcccttgacagctagattctgcttgggtttgaacaacaggaggtacctgagactgaagggcagatggaaggagaggtttaccctccacacctgctttgacagtggtgtcatacccccaggagcagtcccttaacctggctccagctctcactggactcctgtgatgccatttccttcccttgcccccagtcctaaaggcagtaatgctgtagtctgttgcttgtctctgggacccagttacccttgttggtcttgttagccccacccatactgctgaaaatagcacctttattaaaggcttcccatttgaaccagctgagttgaatttgtttctttctaagatcctgatgggcacatgaagaaagagtaaaggtgccaagcatctcaatttgggtggcactggctttctgagatagtgaggttgcaggttggatgggggaagaagaagtgaactggggagctacaggggcaaggcccagggatcaagcccaaaagtagagctgggtcacatgagtctaaactaccagtcattgttgctggtctatgctggtgctgaaacctagagactgccctctggtgagacaggaggcaggagtctctgagcaatggagatgctcacattgtgggcacagttggatcttcattctggggaattcttctgcatccattaggactcagtcccaatggcatggggatcccagagctgagcatgggctataaccagccaatgggctcagagctatgagagaaactggagtaggtaacatcaaggcatgaggttcagggttactctcatggtcttggggactaagtagggaagagaccagggccaggtaggaatggacacaaattagctgatgacagctgtttggggacagaatctgagcccatgaatgatgcaactttgggccactctttggtgttggtaggagaaggaagggattattactgtgataaagatggatgaggaagtcttcatgaaagtggtgtttttggcacaggaagggcaattgcagaatacgtttaagaagtgaggtgctggtgtgttatgcacagtggagggattctgttggtagtactcagtatttgactgggcttaggaagagttcctcataggctagcctcccagcctcctggcctcctgacagaggagtttctcttaagtccttcatgaggtgtccagctggcagtagccaggccatgatggcacccagctccccttctgctcccttcactgctggtgacccaggcgtgcctggacacagttctacccctgacccctggacattgctgcttctctccaggcatcagcatggggctgaagggggttaggccacagttccttttctatcctgtctcatgtccctttcaacatctccaccatagaatgtgctgggtaggtaggaagatgcaaatgttttgaaaaacaaaaacaaaaacaaaaaagccaagtgtgtaaaaatctcactttatttctctacagctgaaattaaattagctcttaagccttgatttccacagtttggagaaaacttgattttgccaattctcatatatatgtgcatctgcatctggggctttatattctatttcattggcctgtctgtctatccttccctgaatgcctcactcttttaattaccacagctttataataagtattgttccctggtagaataagtctctccagaaatttgccttggcttgaattttggggtggaattgtcaagttctctattaatttttgttgcttgatcttgtggccaactatcctgctgtactctcttattaggtctatttctttttactagattattttggattttctgtgtagacagtcatattttctgcaaataatgacaatggatttttctttcctaatctttcataacatttttttcttcttcttattgtgccaacttttagtacaggatgaatggaagggatgggagcagatgtttgtatcttgttcttgtctttaaaggagcatcaacttctctgtaattctcattataggactctcaactcacttttttttttattattatactttaagttttagggtacatgtgcacaatctgcaggttagttacatatgtatacatgtgccatgctggtgcgctgcacccactaactcatcatctagcattaggtatatctcccaatgctatccctgccccctccccccaccccacaacagtccctagagtgtgatgttccccttcctgtgtccatgtgatctcattgttcaattcccacctatgagtgagaacatgcggtgtttggttttttgttcttgcgatagtttactgagaatgatgatttccagtttcatccatgtccctacagaggacatgaactcatcattttttatggctgcatagtattccatggtgtgtatgtgccacattttcttaatccagtctatcattgttggacatttgggttggttccaagtctttactattgtgagtagtgccgcaataaacatatgtgtgcatgtgtctttatagcagcatgatttatagtcctttgggtatatacccagtaatgggatggctgggtcaagtggtatttctagttctagatccctgaggaatcgccacactgacttccacaatggttgaactagtttacagtcccaccaacagtgtaaaagtgttcctgtttctccacatcctctccagcacctgttgtttcctgactttttaatgattgccattctaactggtgtgagatgatatctcattgtggttttgatttgcatttctctgatggccatgatggtgagcattttttcgtgtgttttttggctgcatatatgtcttcttttgagaagtgtctgttcatgtccttcgcccactttttgatggggttgtttgtttttttcttgtaaatttgtttgagttcattgtagattctggatattagccctttgtcatgtgggtagatggcaaaaattttctcccattttgtaggttgcctgttcactctgatggtagtttcttttgctgtgcagaagctctttagtttaattagatcccatttgtcaattttggattttgttgccattgcttttggtgttttagacatgaagtccttgcccatgcctatgtcctgaatggtaatgcctaggttttcttctagggtttttatggttttagatctaacgtttaagtctttaatccatcttgaattgatttttgtatagggtgtaaggaagggagccagtttcagctttctacatatggctagccagttttcccagcaccatttattaaatagggaatcctttccccattgcttgtttttctcaggtttgtcaaagatcagatagttgtagatatgcggcgttatttctgagggctctgttctgttccattgatctatatctctgttttggtaccagtaccatgctgttttggtgactgtagccttgtagtatagtttgaagtcaggtagcatgatgcctccagctttgttcttttggcttaggattgacttggcgatgcgggctcttttttggttccatgtgaactttaaagtagtttttttccaattctgtgaagaaagtcattggtagcttgatggggatggcattgaatctataaattaccttgggcagtgtggccattttcacgatattgattcttcctacccatgagcatggaatgttcttccatttgtttgtatcctcttttatttcattgagcagtggtttgtagttctccttgaagaggtccttcacgttttttcagcaccacaccacacctattccaaaattgaccacatagttggaagtaaagctctcctcagcaaatgtaaaagaacagaaattataacaaactatctctcagaccacagtacaatcaaactagaactcaggattaagaaactcactcaaaaccgctcaattacgtggaaactgaacaacctgctcctgaacgactactgggtacataacgaaatgaaggcagaaataaagatgttctttgaaaccaacgagaacaaagacacaacataccagaatctctggaacacattcaaagcagtgtgtagagggaaatttatagcactaaatgcccacaagagaaagcaggaaagatccaaaattgacaccctaacatcacaattaaaagaactagaaaagcaagagcaaacacattcaaaagctagcagaaggcaagaaataactaaaatcagagcagaactgaaggaaatagagacacaaaaaacccttcaaaaaattaatgaatccaggagctggttttttgaaaggatcaacaaaattgatagactgctagcaagactaataaagaaaaaaagagagaagaatcaaatagatgcaataaaaaatgataaaggggatatcaccactgatcccacagaaatacaaactaccatcagagaatactacaaacacctctacgcaaataaactagaaaatctagaagtaatggataaattccttgacacatacactctcccaagactaaaccaggaagaagttgaatctctgaatagaccaataacaggagctgaaattgtggcaataatcaatagcttaccaaccaaaaagagtccaggaccagatggattcacagccgaattctaccagaggtacaaggaggaactggtaccattccttctgaaactcttccaatcaatagaaaaagagggaatcctccctaactcattttatgaggccagcatcatcctgataccaaagccgggcagagacacaaccaaaaaagagaattttagaccaatatccttgatgaacattgatgcaaaaatcctcaataaaatactggcaaacagaatccagcagcacatcaaaaagcttatccaccatgatcaagtgggcttcatccctgggatgcaaggctggttcaatatacgcaaatcaataaatgtaatccagcatataaacagaaccaaagataaaaaccacatgattatctcaatagatgcagaaaaggcctttgacaaaattcaacaacccttcatgctaaaaactctcaactcacttttttagaaactccactgcctatcccagcaatttgcctctcccaggattcattcttcccccactagccacactttccctgctgctgagctctgtctatgagaatgtcctggggctccagaggggagtgcgaggtgacattctaggacccacaggatagcccaggatgagctcttcccttccagatctccccatttgcatattttgcaggcgagcttcttcatccttcacattttccagtaagtggctgttgaatcaagtggaaaggcaagtgagtgttgctctctctctgctccaccctctttccctgtctatctccctctctatctccctctctccctctccctctctcctccttccttctcactccaaggacaaatggtaattgtcagacagtagaaacccacaaggaggaagaatcacatttttcttcatgtcccataattgtcagacaacaactcctcaatggagttaaacttcacatttttatgtggaaggtcactggctccttccttttctctcaaccttccccttccccttgtatacctgggtccactgggagtagaaagtagcactatctcttagtaactgtcccctcagctctgctaagattgacattgaaaagctttgcaattgccacatgaaggctcaattaaagtcttggccaagggctaccctcttttgcaatctaggatggggagagtatgtggttttcctcttcctgttccatagcaatatgacagaacaaatgagctggaactttcaagttcagtgatttttttttttttaatgaaggaaaaaaaaatgggggctgctcttctagacatgtgttcaccagaaagtgtgggatgtggtttggttaaatgtgtgtatttccattgccatccttcttttccaaggagtttcaatttgcatcaaaatggcagacttgggtaggagggaggggtggcagggatgtcttgcaaagtggccatttggccttttcaaatcttggaccctatggttttattcaactaacactcaaagttatgtcttgtgacaaacaaagtttaaacttaaaatatgacagtcgattctcattactcatggtagttatgttctacaaagtcatctcaaactctgagttaatgaatactgaaccattgctcctaggggaagtacaggtcaaactcatgcaagccactggtcacaatgtttttgtcaagagttcaatacataactttgtttacgtgtgtttttattaaagacaccctatttaatgtacattgttgattcattaacactgaactcacctccgataccaacataactgattcttgaatgaaacttatctaacacacattttctctgtaaggtgcatcagagccttcttgtacttaagaacaatagacagcactttagcactgtgtttggggaccattttaaacagcaaaatcaccaacaaaaagcaaaaacatcaaaagacatggcactaaataggccttggaaaggataattgcttactgtatgagagctgaaacaagaaggcagagtgtcagcttgttcaacctcattgggaatgtgcattggacaactcaaattattctccactttgtgcatgtacagaaatgactgcaaaagcaccatgaatactgattttggagttacaaataaattttagttcataagaaaattcacaaatacagaattcaagaatgaggaaactatgtactaactatatgtttctaactatatgtagaaaatatgtgcatgagaaaacatgtattaaaatactgtgtaaaaacttttaaataaatacttattttaaagaaatagacgttattctttgaacatctcctggagatgaagtgccgtgtgcttccgacagctacttacaaggggaccctgttaacaatctacactttactttgcatatcgacttcattcctatatcaaacgcttccaggagaagagatttaaccacttttaaatgatcaagtgaaaatgaggtttaaacatggttccatatgtcaaatgtgcctcgtgaaacctggcaccaagaaggtgtacagtgcaggtgtgttcttatttcctatcctttctcccatttgatttttttctcttctttcttcacttaagagaggtgccaaaatggtaagagcatagttgggagtggggagggtgtaagtgaaccattctggccaagaaatttctaagtttccaaagaagagtttagtgcgtcctaggtttagtacataagagcagatcttgggaaggccacggaggcaaatacttggtcccaaatgtgttttttgacatcttcatggcctcagaagtctaatgagcgtgtccaggtggaagggaatgcagccattttgttctattttgatttcagcctaatacaaagtttttcctgcggggttttaacctctttctgtggcaaataagtattgtgaacaattccccattgacctgcaaaacagagacagaggagggagccattgctggcttaggagctgagcatgtcagtcttgttcctcagtgttgagtttgtgatctgacctcctgcactctgtgagttcctccctgcttttagtttttgctgtctgtagattcaacccttgcctgggagaatcaccctgttcttttctggaccacctgttatgtgccctccacaccaacttcattctatctctgtcctcactgatgttaagacaggagcatatatgtccagccagagggatgtagtttggggaggaccaaagtgctttctgactattcaccctcaaaggtagcaaggaaattggtacccaggtgtattagtttcctattgctactgtaacaaatcaccacaagcttagtggattaaaacaacacaaatttattctcttacagtcctggaggtcagaagttcaaaatgagtttatgaggataaaatcaaggtgtcaatcatcatggtggacgggaggcaggactagattgcagctccaactcggatggacagagcagggtgtggaggcttgcattgtgaatttttagctccagaatgactgcaggaataaataaggaatcccaagaggacgcacagaccctctgaaggaagcagactgctcctgcaggacccaggagacaccccaaatactgtgagtgcccaaaccatggaattgggaaagggagttcctctacccttgaacacacaccccccactggggaaactgaaggtccagtttcctggagaagattccaacatttcctggagctgaatcaatttagagagctgagcgaaatacaggggtagaggaagcagcgggaaaggccctgggagcttgctgggttcccaagcaggccattcctgcctggcatcacagggatccttcagtagtacggccagaggtgtggggaaaatgccacagagagaaggaagcctccagctgaactttgtaacaattcgaaccagtggaaaagccttctggccagaacccagggagagcgtgagtctggcatgcagactccacaggtgagggaagaactaaagctcttttcttttgcagctgggaggcaggtagcctggggcacgttctcagccctgcttgcccacagcctggaaacagacttggtgctgttaggtgatgcatgttaggagtgagactggcccttctgattgcatgggagctgggtgaggcctgtgactggttactttccctcacttctctgacaatctccatgactcagcagaggcagccataatcctcctaggaacacaactccattgacctgggaagctcacccccgtctcccacatcagccgcagcaagacccacctaaggagagtctaagctcagacatgcctagccctgcccccaactgatggtccttccctacccaccctggtagctgaagacaaagggcatatactcttgggtgttctagagtcctgcccactgccagttcctctccatactaccacagctgatgctctctggaaagcgccacctcccagcaggaggtcaaccagcacagaaatagagcattaaaccaccaaagctaagaaccctcacagagtccatttcacccccctgccacctccaccagaacaggtgctggtatccacaactgagagacccacagatggttcacatcataggactctgtgcagacaaccaccagtaccagcccagagcctggcagacttgctggatggctagacccagaagagaaataacagtcactacagctcagctctcaggaagccacatccatagggaaagggagagagtactacatcaggggaacagcccatgggacaaaagaatctgaacaacagccttcagccctagaccctctttctgacagagcctacccaaatgagaaggaaccagaaagccaactctggtaatatgaaaaaatgaggctcttttacacccccgcaaaaatcacactagctcaccagcaatggatccaaaccaagaataaatccctgatttgcctgaaaaacaattcaggaggttagttattaagctaatcaaggaagcaccagagaaaggtgaagcccaatgcaaggaaatccaaaaaacgttacaagaagtgaagggagaaatactcaaggaaatagatagcataaagaacaaacaataaaaaattcaggaaacttcggacacacttttagaaatgtgaaatgctctggaaagctccagcaatagaattgaacaaatagaagaaagaaattcagagctcggagacaaggtctttgaattaacccaatccaacaaagacaaagaaaaaagaataagaaaatatgaacaaagcctctaagaagtttgggattatgttaaatgaccaaacttaagaataattggtgttcctgaggaagaacagaaatctaaaagtttggaaaacatatttgggggaataattgaggaaaacttccctggccttgctagatacctagacatcgaaatataagaagcacaaagaacacctgggaaattcatcataaaaggatcatctcctaggcacatctcctaggtcatcaggttatctaaagttaagatgaaggaaagaatcttaagagctgtgagacaaaagtaccagtaacgtataagggaaaatctatcagattaacagcagatttctcagcagaaaccctacaagctagaagggattagggccctatcttcaacctcctcaaatgaaacaattatcagccaagaattttgtacccagtgaaactaagcatcatatatgaaggaaagatacagtcttttccagactaacaaatactgagagaatttgccactaccgagccaccattacaagaactgctaaaaggagccctaaatcttgaaacaaattctggaaacacatcaaaacagaacctctttaaagcataaatctcacaggacatataaaacaaaaatacaatttaaaaagcaaaaacaaaaaaccaaggtacacaggcaacaaatagtatgatgattggaatggtacctcacatctctacactaacattgaatgtaaatggcctaaatgctccacttaaaagatacagaacttcagaatagataagaattcactaaccaactatctgctgccttcaggagactcacctaacacaaaaggactcacataaacttaaaggaaagggatggaaaaaggcatttcatgcaaacggacaccaaaagcaagcagaggtagctattcttgtatcagacaaaacaaactttaaagcaacagcagttaaaaaagacaaagagggacattatataatggttaaaggccttgtccaacaggaaaatatcacaatcctaaacacatatgcacctaaaactggagctcccaaaattataaaacaattactaatagacctaagaaatgagatagacagcaacataataatagtgagagacttcaatactccactgacaatgatagacagatcatcaagacagaaagtcaacaaagaaaaatggatttaaactataccttggaacaaatggatttaacagatacatacagaacattccatccaacaaccccagaatacacattatattcaacagtgcatggaattttctccaagatggaccatatgataggccacaaaacgagcctcaataaatttaagaaaattaaaattatatcaagtactctcttagaccacagtggaataaaactaaaaattaactccaaaaggaaccttcaaaaccatgcgaatatatggaaattaaataatctgctcctgaatgatcactgggtcaaaaacaaaatcaagatggaaattaaaaaattcttcagactgaatgacaatagtgacacaacctatcaaaacccctgggatagagcaacggtggtgctaagaggaaagttcatagccctaaaatatctacatcaaaaagactgacagcacaaactgacattctaaggttacacctcaaggaactagagaaacaagaacaaaccaaacccaaacccagcagaagaaaggaaataaccaacattaaagaagaactaaatgaaattgaaacaaacaaacaaaaaaatacaaaagataaatgaaacgaaaaggctggttctttgaaaagatacataaaattgatagaccattagcaaaattaaccaagaaaagaagagagaaaatccaaataacctcactaagaaatgaaacaggagatattacaactgacaccactgaaatacaaaagatcattcaaggctactatgaacacctttgtacacataaactagaaaacctagaaaagatgttgggaggcctaggcgggcggatcaagaggtcagcagattgacaccatcctggctaacacgatgaaaccccgtctctactaaaaatacaaaaaattagcctggtgtggtggcaggtgcctgtagtcccagctactcaggaggctgaggcaggagaatggcgtgaacccaggaggtagagcttgcagtgagtggagcttgcgccactgcactccagcctgtgtgacagagcgagactctgtcaaaaaaaaaaaaaaagaaagaaaaaaagaaaacctagaaaagatggataaattcctggaaaatacaaccctcctagcttaaatcaggaagagttagataccctgaacaggccaataacaagccgcaagattgaaatggtaattaaaacattaccaacaaaaaaagtccaggaccagagggattcacagcagaattctactagacattcaaagaagaattggtatcaatcctattgacactattccacaagagagagaaacaaggaaccctccctaattcatcctatgaagctggcatcaccctaataccaaaaccagaaaagaacataaccaaaaaagaaaattacagactgatatcactaatgaacatggatggtaaaatccttaacaaaatactagttaacttaatccaacaacatatcaaaaagataatccacaatgaccaagtgggttttatacaagggattcagggatggtttaacatatgcaagtcaatagatgtgatacaccacataaatagaattagaaacaaaaatctcatgatcatctcaatagatgcagacaaagcattcaacaaaatccagcatcgctttatgattaaaactctcagcaaaatcggcatacaagggacatacctcaatgtaataaaagccatctatgacaaacccacagccaacataatactaatgggggaaaagttgaaagctttccctttgagaatgggaacaagacaaggatgcccactctcgctactcctcttcaacatagtactggaagtcctagccagagtaatcagacaagagaaagaaataaagggcatccaaattggtaaagaggaagtcaaactgtcattttttgctgacgatatgatcatttacctcgaaaaccctaaaaactcctccagaaatctcctaaacctgataaaagaattcagcaaagcttccggatacaagattaatgtacacaaatcagtagctcttctatacaccaacagcgaccaagcggataatcaaatcaggaactcattccttttacaatagctgcaaaaaaatggaaatacttaggaatatacttaatcaaggaggtgaaagacctctacaaggaaaactacaaagcactgctgaaagaaatcacagacaacacaaacaaatggaaacacatcccaggctcatgggtgggtagaatcaatattgtgaaaatgaccatgctgcaaaaagcaatctataaattcaacacaatccccataaaaataccaccatcattcttcacagaattagaaaacaattctaaaattcatatggagccaaaaaatagcccacatagccaaagcaagactaagcaaaaagaacgaatttggaggcatcacactacctgatttcaaactatattgtaaggccatagtcaccaaaacagcatggtattggtataaaaataggcacatagaccaatgaaacagaatagagaacccagaaataaacccagatacatacagccaactgatcttcaacaaagcaaacaaaaacataaagaggggaaaggacacccttttcaacaaatggtgctgggataattggctagccacatgtaggagaatgacactggattcttatctctcaccttatacaaaaatctactcaagatggattaaggacttaaacctaagacctgaaactgtaaaaattctagaagataacattggaaaaacccttctagacattggcttaggcaaggatttcatgaccaagaacccaaaagcaaatgcaataaaaacaaagataaatagctgggacttaattaaactaaagagcttttgcacagcaaaaggagcagtcagcagagtaaacagacaacccacagagtgggagaaaatcttcacaatctctacatctgacaaaggactaatatccagaatctacaatgaactcaaacaaataagcaagagaaaacaatcacatcaaaaagtagactaaggacatgaatatacagttctcaaaagaagatatacaaatggccaacaaacatatgaaaaaatgctcaacatcactaatgatcagggaaatgcaaatcaaaaccataattctataccaccttactcctgcaagaatggccataataaaaaaaatcaaaaaacagtagatgttggcatgaatgcagcgatcaggaaacacttctacactgctggtgggaatgtaaactagtacagctactatggaaaacagtgtggagattccttaaagagctaaaagtagaactaccatttgatccaggaacctcactattggatatctacccagaggatgtttataacagcaaaaatcacaattgcaaaaatatggaaccaacccaaatgcccatcaatcagcaagtagataaagaaactgtggtatatacatatgtatgtgtgattatatgcgtatatacataccacatatatatatgatggaataccactcagccataaaaaggaatgaattaatggcatttgcagcgacctggatgagattggagactattattctaagtgaagtctaagtgaagtaactctggcatggaaagccaaccaaacgttgtatgttctcactgatatgtgggagctaagctatgaagatgcaaaggcataagaatgatacaatggactttggggacgtggggggaaaggtggaagggggcaagggattaaaagactgcaaatagggtgcagtgtatactgctcaggtgatgggtgcaccaaaatctcacaaatcaccactaaagaacttactcatgtaaccgaacaccacttgtacccgagtaacctatggaaaaaaattaagttcaaggttaaaaaaagttattggtaaaataaaaatagaaatgtctcaaaaataaaataaaatcaaggtgtccgcagggctgaattctttctggagattaccttgattttcagcttttagaagttgtgtgcattccctggcttgtggctctttcaaagcataacattccaacttccgcttctgccatcacatttccatcacatctcatcatattttaaacatttctatttatttatttatttattttaaaaatagagatgaggtctcactatgttgagcaggctggcttcaaactcccagcctcaagtaattctcccactttggcctcccaaagggttgggattacaagtgtgggccactgcacccagcctatcactcaatcgctctctctcttttttaataactctattattcttgccttcttcttattaggacccttgtgagtacaatgggtgcacccagataatgcagaattatctccccatcttcagatgcttaccttaatcacacatgtaaagtcccttttgccataggtaacatattgacaggttctggggattaggatgtggacatatttgtggagggtgtcactatttagccttcacactggggtatagaagcttcactcagtcagagccacttcagtagaattgtgtacctgatattaagagaggttcttagctaaaccctgcttggagcaaaggagtcaggctcaggtagagtaatctgcgaaccagaaacataagcatgatatgtgtttatggtgctataataagaataaccttggagctgaaactgggactgcctcttcattaaatgctcagagacctggaaagcagtggcctaaccatgaacaaaaatgctgttgtgaatatgtgcaatctaaacactcagctgggctcacgcctataatcccagcactttgggaggccgaggtgagagggttgcttgggcctaggagttcgagaccagcctgagaaatatagtgaagccccatctcaaccaaaaatacaaaaatgggctgggcatgggcctgtggtcccagctacttgggaggccgaggtgggaggatcgtttgagcctgggaggttgaggctgcagtgagctgtgattgtgccatcggacttcagcctgggtgacagaggaagaccccatctcaaaaaaaaaaaaaaaaaaaaaaggttaaactcttagaaatggagaatagaatgatggttactagcagctaggtggtgctggtagtgggaggagaaaggtgatggttggggagatgatggtcaaagtgcacaaaatttcaattagacaggcagagtaagttcaagagatcgatggtacaacatggtgtctagagctgataacaatttactgtatttttggaaattgctaagggtagattttatgttttctcaccacaaaaaatgacaagcatgtgatgggattcatatgttcattagcttgctttggccattccacaatgcatacacatttcaaaacatcatgccgtacaccataaatatatgcaatttttattagccaattaaaaaataaattagttaattcttaaagatgttgttgtaaagacaatgtgactgtggatggcgatgccttccagggtcaacaccgacttccccacctgcttctttcccttgacattcccacaactctgccgatggtggagttgatcctcaccatcggggaggataataatgaaaggaaggaggaagactaattcccagagttcaactacagttcgctcttcataacacaaagaccatttgctgaaataaaatcaaactgcaggacctcagcttatcatttgggggagtttgccagaccatgcttgaagcctcctgtgaactttcctgctagctgatgtagcgctaacagcttaaatgatgaggaaatcatcgaagtgtttgctgtagacttgtgtcccctttggggacccagacctttgataagcttcccttctttatgtttagtcaagtaatggataaaatcttaagatcaacacagtttcttcaatcaatattcttacaaccagctataatctatctaatcaaaatatgacctggtctgtacgtttctatcttcccacggggctctcttttttttctttttccccacaccaaaacagtactttattttgcaaattttgaccgattattactcccatgttattttttttcagctgtcaaatgtacaagatgaagagaaatttcagttagacaggggctgcacctggaaaataaatttcttaaactccataaacacgtttcaaaactgctgggtcccaaaagtccgtctatgaactctagggctgccagtatcatgtgcagcactttaaagctacgctatctaaatagcttattaattctgcataaatcaggtcaagcaatgtgtcaacctgtaacagactgtgcgctttaactgaacatggcaaaatattcactcttttgaactttacatcatcatttgatgtcaaacaatgaagcaaatcccaacagtatatacaaaaaacagctttgcatttataaaagatcatttcccatactgactaatccaggcagctaactcattggtttatttaactttattgaagaaaaataaatcaattactagcagagctgttagttgatcactcatccattgacaacttgcatcatttattcagtgctatatcaaacagtgtattggaagatagattaactaatagctccgagcctcctaacaatttaaatgaaaattacaaaatgtttgagaccctattttggaatacaaagggtgtttgacttccaatttccattctctgtagaacaagaacaggtcattcctttattgacatgcataaaatacatcacattttctgttctgctgatgctataaattcaataccagttctctagccacatcagttatgagcataaagtatatcatgtaacctcaaatctgtaacagtggaaggcttaaacaagaatggatgctgctggaataatgctgtatcctttgatgtgacaactgagcatccttctccctccccctcagatgatttcttcagcatgttagagcaatgaggaatggttttagtctcataaccaagttagagtgaagacattggctacataatacacatgctccatttttttttttttaaattctgagtcttgggcagcaactgttctcttgtaactactttacagtttctaaaagcagttattgtccaaagctggaagaacttaagtcttctcagataagcatgtgaatgaatggagggaggtaaaaaaaaataaaattaaaaaaggtgaggtctgataggggagcagccggataagaaaatcaaaaaagaaacagtaatttaaagtttattccagctataatgcaggttattctgactttaaggtaacatcacatggcatacttctgagtccattcccgagatattctgttgtacttatctctgtctgttttatagatccgtgcaatctctggcactaggggatcatctgggtttggatcacatagcagtgaacaaatggataaaagaactttagaaagtgttaaagcaggcgaccactgtgatcttagaatgtcaagaaaaatgctgccattactgttaatatttgggtgataaattcttgttgtaaatgcaaccttagatggtttgaaggggtagtctgtaggaaaacgaattgtccaaaagaatacaccgccttgatatggtctgtcatgaggtcccataattgtggcttgccagtgaaacatatcatccccaactggacctgcagaacattgtgctggagggtcacgggccaaatcactaagttccttattaatccgtttcagcgccatagtgtgtgcttgtcgtctggctcctcactctctcagtgtatgctcaaaggtccggccaaaactcttgattatcctggcggcggggcaggattgtctcgtctcacaccagctctgcccacggggctctcttgagggaagatatccaaagtttaacagaactctagaaaagatagagccttgacattcatgaaagactcatcctggaacttagaattcccctggaaacccctagttatataaccaccaccatggcacacaatttcttccagaagatgtatttttttcctctataggctggagcatgaatgtatgaatcacttcttatttatgttaaattacatttttataatttataaattgtattatattaaattcactcatgccatggactggaactagagattcttaatattcattatattctttaaagttatccaaactttagatgggctaaaatctatccttttcttagagagtccttaactcttcacctaataacattttcatttctttctttactttcaaaaccagcaccagcttccattccgagaaaacccttggctttctttgaggggcatattcccccacaaaggaatatagttttttattatttcatgagagcatgaaatacaatattgagtaaagaacaagaaagcctcattgaaatggggctgctttgttgttgggtaggcttagctgctggggtgcaagatggaaacttacacttcgcaaaataacgaatgaccgaccacatcatggatctttgagattgctcacaaagtcacaaatagcaaagctgctgatataaagggctaccatatgttatatcaatgacacgtctctgtactgtccacagtgaggacataccaacttctttttgtttcaagcaccattctagaaggactgaatctagaaggactgaattcctgtgtgacaattccagtttctatcatacatctccagagtgacagcttttcttcctcttttctccctaatccagtccccagtctccggctgcctctcatcataattatgtgtaatgttggctgacgctatacttggatgtacagggaaactgtaccttcttgatttttctaccattgattgaatcttcaggagcccccatctcatgggaggtggggaagctattcatgatatacagtctttttgaatgtacatagactcccttcagttgaaatcattcatttctggacatgtgaaatcttttgggtttcagtccctgcccttgctactttctaatatggttgagcttccagggactgcatgttggaggaggggaggaggaagatcagaatcatatactgttctagaattctggatccttgctggctctgctgcaggatggatttcaggatggattgctgaggaataatgtgccccatctggtcttttggagtctgtggtcctggccacttgtccttgatagcaaaggcaccacacataatgatcactttgaccttactctgggcctctgcccatctgccacccctaagtagggcatacaggaatttatggatccctgcacctcaccgtttgctgtggcatattagggcattggtcagactcctccatctccctgcctcctcccgtggctgcatcaccatttctctagaacacctgcagggctcctcttagaggtctggggccttcctcagtgagcccagggaagcatcccattgctgccttcctgccccatgatctcaggcttctctacacttagatgtttctatagcttccccacctccaccacctagatttagctcctgaaggagaaagcaaggacaaatgcattcagccttcaagtattttctgtttctttcttttccaccatccactgaggctagaagggatgggctctgttttcttcttcctctatcgaaaggacttcctctacatcatagcctcctttggagggccattaagcttcctggttcagtgttaatggtggaagagcatcttctcttacatgatggaagaaactctgtgatttgagttgaccaggtatgataggaagtccaagatgactagggacttgagaccacaggagataaaaataccctggtttgataatcccaaaacatatccactacatgtgacacaatgttctgaattcatctaggagaaattctgttcctggaagtaatcatttcaaacataacaaaataactattacaaataacaaaaataactattgtctgcttatgatatgctaggcattttctaagataatttaatccacatgcaatcctatgatgtcagtgctattacgattcctattttacacatgaggaagtaaggtctggataggaggtaaagaatctgttcaagttcacatggttaaataaagaattattatttgaccacaattctggctggctgggaccccaggcccttccatcctgcctgtccccacccctctttcttcattcagctcatcagcctctttcttcattcagctcatcagctgcccagtcggctctcccctaaacactctgaatctgatgtgcctgtcgaaccaagctacgtgctgttccacttacagtccgtctaattttccctcctctaggtctttgttgcttctgttcccttttcccggggtaccctcctgtcaccattccccatggccccaaaccttctctgatccccacagccagaaggtatttgtgtctaaattcactctatctttgcagtgtctctccagtgtctcaactttcacgtggaattagtcacacattatctcgggaaccaccttgagattcaggcttgcatctccatcctctttgtttctccacagcatctggggcagaagctgcatgagtgagtagaagacccttttctctgcacactgggccatgcctgcagcagagtttagcaaaggcttatgttaggaccttgcctaggagctggttccagagctgggaatccgaggttggcatgaagtgagactccagagactaattctttcgtctcagtctgtgactcacatgtggaaattcagtctaagaagtcaccaaagggatacaacgaccttgagtctgcatggctttctgttctaagggcatctctgggtttcctccctgcttcttggaggcaaagccttctgcctatttccctatttagtgataactttttctaagttccagtaaaacaacccccgctcctcaatttgttttatctgaagaaagtgccaaacccattattggaaaatgaaaaatattgtcctgtttcatgagctctttgaacatctgtatagtagtacatggttcaagatttcaagattgtttatttccttctttttagatacagggtctcactctgttgttcaggctggaatgcagtggtgtgattatagctcattacaggctcgaaatcctgggcaagcaatcctctcacctcagccttttgagtagttagagctagaggtatgtgtcactatacctggctaattttttcatttttttatttgtagagatcaggtcttgctatgttgccaaggttcctggcctcaagcgattctcctgcctcagcctcccaaagtgctgggattataggtgtgagctaccatgccccacctcaagatttattattgttattgatattgcatttgaagttattggcatgacccatagcctaatgataaagggactcaacagtaaaacattgaaggcagatggatctagagagcctctgaggcagtcatttgcaggatcagggtagggatctttgccaattaatgtggtcatattcctaccattggaggagtcagattaaattgtgcttgaaggaaataaagacatttactatgggaatccaggctgccttgctaatgaattgctccatgtagcagcgaggtttctcccagccgagggctgaaagtgaagaccttgcttagcaaaaggtatgttgattaaataaatgtgttcctcacatagtagttccgccactggacactcagggtttctgtatccatgtcctagggtacagctatccaaacttctgccaggaaagaaacagataaaagttgtgtttgtgctgctatttagtggggcatgaggctgggtgtggtggctcatgcctataatcccagcaatttgggaggccaaggcaggtggatcacttgaggtcaggagtttgagaccagcttggccaacatggtgaaaccccgcctctactaaaaatacaaaaattagctaggcgtgatggtgtatgcctgtaataccagctactaggaagcctgaggcaggagaatctcttgaacccaggaggctgaggttgcagtgagtcaagatcgtgccgctgcactccagcccaggtgacagagcgagacttcatctcaaaaaaaaaaagggcgccaaacatctactgtgtacccacaaaaattaaaattataaaaagacggcatcagcaatcccaggaggtgatgtgtccctggttggtgtacctcaggagttgctgcatttgcctcacatcaccatgtgagataaagtagcaaatgtaagaagccacgtgtgctcatttctgtttgccagcaaaatttcacaaagcttcttgcctgagtcactatatttctcgaaagatgaatgatcctagcccttgcctttttctgcacgtaagataacatctgacagggttaatgattatgcttctgtaattataaccagatgtactcttgcacccaagctttgatgtgattgtacacgtgctaaaccttcatcacccgcatataaactgtgaactaaaacatagctttggaggtgtctgacagaacctctctgaaagactcctcttgggctatagtcctcagtcagacttctgaataaaaccaacttgaactctttaaaagtttgatgtttatttctttagaaggcatttggctgctaggagacacaaagcacaaccacagctaagtcagccagcagtggcttgggtgaagactgcacgttgtgttgtgggtggccctgtacttgccttgttttggagtgcgagcaaaccccctcccctccacctgcttttcctggggccgggttacctctcagcacaacctgctttcccatttggctcctgaatcacttgcaaacagctccatgtgcattcgagtctaatgcgttaagagcccctccacgcccatttatctcaataggagaaaagaaaggcaggagcactaggatgattctggggtgattctctctggtttccctggaatcctggagtctcaattatggtcccttggattggatgtgctcttggcctgccagagggaggaacagtatcttttctgcagtttaagattctgccgggaggccagaaaccagctgagggtccactccttaggagtcaggagtgcagtccccgagtgcagttcgctgcatcagagtgaaaatcttggggcaatatcttggctccagcaagcattagctgtacccttaagcaaggcatttccttttgaaactccgatctcctcacctaagaaaggagtgagttgaattatatgcccctataaggcctttcctggtctgtggtctgtggtgtgtgtgtgtgtgtgtgtgtgtgtgtgtgtgtgtgcgcgcgcgcgtgtgtgtgtgtgcgcatgcgcgcgcacccatcctcttgagccaaaggagagacagctgttaaattggaaggatatgtttcaaagccatcatttttcctgtagaaatagaactcactttaagttttctaattacctcctacatgtcacattctttcttcctctttaagtctggattgcttctcatgactgagggcctgaagccatcttttgatttcttcaatctgtaaagcaacttattttaaattttgaatgctgatagaaaaggctttaatagcttcattacagagccatcttttttcttattctggctgaggaaatggatctgttttgctaaatgagattaatttttcaatgtatataataataggcataaatgtgtacatcttagcatattaaaagtgtcttaagcttaccattaattagtcttgagaagaaaagactaaatacaagtgtaatgaatttattaccagttggagggatgaatagtcacggtgcaatcagcagctttcattggaacaaacaagactgttttagaatgaaggcatcgcatcagtccaggaccgtgattccttgcttatttgcatgcatgaatacactccggggccattagcttgaaggacataaccgagaggaggctgattgatgctatgagctaccactgttctaaaaatgccttcaataagttccttctctgtttcaaggtgggactgtttaggtagctattacttcactcatatctaaatatactaacatgcttaaaagatcagcagagaaagcacttgaaacctgtgactaaattccacatgttaattatttaattggataacaacattacactttaatcactggaaaatcacaaatacacactgatatttacaaaagttttttcagttaaatttcaatgaaaggaagttggtatattctaggacaaaaaggaacagggtgatgaatcctgctgacagacttgactggtacatggtccattcctaaagaatctcctgattcggctaagagccaggatagaataataaataaaaatacaattattatatttatagaaatgtacataacctaaaattgttacttgcttggctttgaaatgcattattacacaatgcatttcaaagccaagcaagtaagaatttttgtaaatcagaattaacagttttgcttaggctaatattatagtgtgtttgcattttcttttattttccttttgagatggaatcttgctctatcacccaggctggagtgcagtggtgtgatctcaattcactgcaacctctgcctctggggttcaagcaattctcatgcctcagcctcctgaggagctgggaccacaggcatgtgccaccacgccagctaatttctgtatttttctagagatggggtttttggccatgttggccaggctggtcttgaactcctgacctcaggtgatctgcccatcttggcctcccgaagtgctgggattacagatgtgagccaccatgccggcctgcattttctgagagtacaatgattgggctgaaggtgagtctgctgggtggtgatagaaagaaatattggttgaaacttcagtcagagaaacaaatcaacaaataatagaaacaatcaaacaagcaaacaattaattccttgtctataaaaaattaggaattggtcaaatatggttgggtcagtcccaaaccaggtaccatttgcatagctaccacatcaaaatgaatcaagaagaaatgaagacgtgtacctacagttaccacaaatgtataatacaaacagattcagaagtgatatttatgcagcactagggtgctattttgcaacatgcagggaggactgtcaacacttctaagaccgcagggatgctgagagtcttggggtcactgagaatctgaggttaaatttcccagattataaccaagaacagggatccctttttggcccactgtagacaaggtacactgtgaagtcttcaggagtctttcatccaaagaacagggatgaaaaagtgtgggtatttctctaataaatcacagtggatggggtttccaaataaactccctccaaataaactgttcaatatcacttctccattcttatcgtgtgcacagttgaaaagcacattcacaaaccatggcctcaatgggctctcccaacagtcttgcaaggtatgaagagcggatattttcatcatcgccatttcattaaagcaaaactgagacacagagagaaaacatcatgaatttaggacttgagtcttagagttaggacctgaacccaggtctttggattctaggtagagttccttttgtaaaagagggagtgttctagaaagtggtccagtccttagcaaaatgcccacagagattatgttcattgccagtggcaacctccacttttttctctgtcctctttccccctgaccccagagccactgaaatcctttgcactgaggaggcaaaaattgacacctcaggattacccatctccacccaaataaaatgataagctttcaagcatcagtgggaaagtgatttttaggttctttcctttgaaattacaccattgtggataaccacataaggctgggctgactataagaattttttttttcttgaagccaaaatcctagagaatgccctgggaggcagtaggaggtgggtgggaaagttcagtatgatggctgtaacacacctcccatgatgctgtaaaccacgcactgacaaacttatcgttacatttccattgtgtctaagagtcttcttctatagccgttggttgttgttgttgttgttttgttgtttgtttgtttgtttttttcctgagacagagtctcactctgtcactcaggctggagtgcagtggagcaatctcagctcactgcaaactccaactcccaggttcaagctattctcctgcttcagcctcctgagtaactgggattacaggcgcccgccaccacgcctagctaattttgtatttttagtagagacagggtttcaccatgttggccagcctgggttgaactcctgacctcaagtgttccacgtgcctcagcctccccaagtgctgggattacaggcatgagccatcatgcctggcctatagccttttgatattcctgcactggtaagatacagaattagggaagatggagggtgaactatctatatatctggagatagcttggaaactccaatagcttctgctactttgttatgttttttatatgtttttgattgtaatcaaatcaagtgttttttattacagtaggtgaagagtaaatgtcagctcctgctgtccctgtctaatctcattggtgtggtttgcacacagtacatgttcagtccatgtcagttgctgctccttgtgtctaatctccttgttgggattgtggacacagtaggtgtcgagcggatatcagtaaatgtcagctgatttggttcatgtctagtctcattgtatgttacgactttgcagcattcagcttcttgagggcacgggggaggcatgaacacagatgtcatttcccatgcagcctatgaacttggttgatggtgggtgatgctctgagtactggactggggttttcaattgtgtgacaccagtgggtcacttcagcctgatacagtccacctcttctgtggtgggcaccccgttggttctgaggtcaaggtcagcactggacttgctcccccgctgggagggacgccagtgcagcagcatcatcttcttgaagtacttcatggtgttgttcttgaccgtcacgaagcacacggtgttgatcatgctgttgctcatggcgatgcactcgaccacgtagaaggcagtgaggtagtgcttttccttcacgaacacagtggggaagaagtcacgaacgatggtgaaaccgtagaagggtgcccagcacagcacataggccgtgagaatgcacatgagcaccaggaccgtcttcctgcggcagcgcagccgcttgcgaatctgctccgtctggaacccagggactgccttgaaccagagctcccgggagatcctggcatagcacagggtcatggtgaccacagggcccacgaactcgacaccaaagatgaagaggaagtaggacttgtagtagagctgctgatccacaggccagatctggccacagaagatcttctcctggctcttgacaataaagaggaccgtttctgttgcaaagtaagccgatgggatggcaatgagaatggacaccatccagaccaaggcgatcaggaaggaggccgtttgataattcatccgtggtttcaaggggtgaacgatggcgagatatctggtgggggagggaagccaacagtagtaatgatgaatacgtggaaacgttagtttgtaactaaccccaaacatacactaaagcagtggcacagtgaatcctcatgtacttgttatccagctttaacaagcttcatcttattttagcaacatcatttggcatagtgaagtgttttagtgaaaacagcacaggctttgggtcaaacaggctgaataaatcctgggttttccctggattggctttggggtctgagatgaattattcaatctccctgagatttatttcctcaaatgcaacctggaataagatgatacttactttgcagggctactgtgaacactaaatatggcaatttttgtaaaatgctttgtgtatagtaggcgttcaataaatacttgtgtcctgttattattcttaagcatcctattataccaccttgggtttccatcttgtcattctgcccaagaacatacaatactctcagagctcttcattccaaatagctcacggtttaggtgaaggaagggcttatggcccccagacagaggtgggagcctttctcagggcagttggcaagaatttgcttcccctcccatgagctgtcatcctgcatttcagaggcaggagagtcaaggtaagcttgtagtgaaatctaaggactctaatgaaaagtaaatgccttgcccaagctcacatcatgcagggaccagaatccaggctcttgatacaaagcttatgctcccacctccctgggccatcttgtgctcaaatgagaaggtgtgtgaagtctttatccttgccctttccaatgagccacactgtcttggagacagattggagccctttgtgggaaatgagctcatttgtgtggattgaatactttctttccagagagacctaatgacacctatttagacacctggtgccctggcatcatttctatgcatcttatggttggggtagggggtaggggaggaatgctttgggatatggtagatgaagataagaggcatgaaggacagggaggaaacaaatcaaccctggaaatgaacgtgtacttcatacctggagcttgagtcaggtgagaacaagagcaggatgccgcctgctggtaaacaggccccccaaaacctggccataaactggcgtcagcgtaacaatgggacaagtgtgggctctggttcgttccaccttggaactttttcacactgatgatgaggaggaaggagagtataacgaagtaacagaagaggttacagagcaggtttatttgccagctaaagctaaagcggcaaaggagggagaggttcatccctactcttctgcaccccctccttattattttgaagaaaaagaccctccagatctttcttttctggaggacactgggtgaaaagtagttgccccagtgactattcgagcagcacttcaagcgactgctcttagttctattcaggcaggaattcagcaacctagatgagagggtgatttagaggcttggcagttccctgttagaatacaccgccccagatcaacagggaaatattatagctacatttgagccttttccttttaaattactcaaataatttaaacaagctataaatcagtatggaccaggttctccttttgtagtgggactgttaaagaatgctgctctttccagtcggatgatgaattcctactgactgagatgctcttactcgagctcgtctaactcctgctcagttcttacaatttaaaacttggtgggcagatgaagcttccattcaggctgcttgcaatgcccaggcccatcctcaaattaatataactgcagaccaacttttgggggttggcgactgggctggtttagatgcacaagtggtcatgcaggatgatgccatagaacagcttagaggagtgtgcattagagcttggggaaaaatcacttcatgtggagaacaatacccttcctttagtgctataaaacagggaccaaaagaaccatacgtggattttatagctcagttacagtagtctcttaaaaagatgattgcagattcggctgttcaggatagagtgttgcagttattagctttcgacaatgctaatcccgattgccaggctgctctgcgacctatcagagggaaagcacatttagttgattatatcaaggcctgtgatggtatcggaggtaatctgcataaggctactctgctagcacaggcagtggcaggactgagagtggataaaggaaatactctatttcctggagtttgttttaactgtgggaagcatggtcatactaaaaaagaatgtagaaaaaatcagtgagtcaggccaccagataggggaaaaaagaaaactgctgagcccaaaatatgtccaaaatgtaaaaaaggaaaacattgggctaatcagttcactctaagtttgagaaagatgggaacctgatttcggaaaacaccatgagcggcccgtcccgggccccattctaaactggggcatttccagctcaggccattccctgacccctgtacaatgtctgtcccctgacacagctggtagtgctgcagtagatttatgctgcacaaaagctgtgagtcttctgcctggggaacccccgcaaaaggtcccaacaggagtctgtggacccttgccagcggggacgataggattacttctaggaaggtctagcttaaatttaaaaggggtacaaatacatacaggagtcgttgattcagattacaatagggaaattcaaatggttatatctgcttctgttccctgcaaagcagagccaggagagcgtctggcacagctcctgattgtgccgtatgtggaaatggggaaaagtgaaattaaatgaacaggaggatttggaagcacaaataaacaaggcaaagcagcttattgggtaaatcaaattactgataaacgtcctacctgtgaaataactattcaggaaaaaaaaatttaaaggtttggtaggtacaggagcggatatttcaatcatttctctacagcactggctgtctgcatggccaattcaacccactcaatttaacatagttagagttggtaaagcccctgaagtatataaaagtagttatattttgcattgtgaagggcccaatggacaacctgggactattcaaccaattataacttctgtacctataaatttatgggggagagatttattacaacaagttctaattccagaacaattatatagccctcagaatcaacatatgatgcatgaaatggggtatgtccctggtatgagactaggaaaaaatttgcaagatttgaaagaaccacttaattggaaagacaaagttcccaccaaagactaggataacatttttgatggcggccaatgttaagcctccagaacctatacctttaaaatggttaacagataaaccaatttgaatagaacaatggccactaagtaaaaagaaactggaggttttagagaaattagttactgaacaattagaaaatgggcacatagctccaacattttcccattggaattctccagtttttgtaattaagaaaaaaatcaggtaaatggagaatgttaactgatttaagagccatcaattcagttacacaacctatgggagcattacagccaggattgctttctcctgctataatccccaaaaattggcctttgatagtcatagatttaaaagactgtttctttactatccctttagctgagcaagactgtgaatggtttgcatttacaattcctgcagtaaacaacctgcagcctgttaagtgttttcattgttttatagatgggtttagtaatggtaaagcttcttattctggctcgaaaagtaaagttttccagacgccctatacttcagctcaaaaagcggagcttgtagctgtaattgaggtattgactgcttttgatatgcctattaatgtgatttctgattcttcatacatggttcattccacaccgttaattaaaaatgctcagttactgtttcatagagataaacaactgatgacaaaaacaaaaaagggggagaaatagggattacaggacagcccatacacaactgaatctagcattattaactttacattttttgagcctgcccaaaggccagatgttatcagcagctgaacagcacctacagaaaccagctgcaaagacaaaagcagaataactgatttggtggagagatccaataacaaaaagttgggaaataggtaaaataataacttggggtagaggttatgcttgtgtttctccaggccaaaatcaacagccaatttggataccatcaagacacctgaaaccttatcatgagccagatgctgaggaagagattccaggaggatcccgaggaccccccatttgcagtcatgtcgagactgatgctgaggaggaccccaactgtcacaagcaacacccgttgaacacagccacccacctggggacagatcaagaagctgtcatagatggtggaagaaaacctgaggaaagcaggacaaccagttacaatgagtaatttaatggtagctatgatagcggtgatcaccattgccatgagtattccttcaacaacggctgacacagagaacaattatacttcttgggcatatttatcaatcttggctggcaataatgcctggatataatcactctatgatgcagttacacatgctttctgatctcagtatttaccgtaataaatctgctcctataattgaggcataccaccctcaaaaaactacttgtaaacaaaatagaacctggccagaaataatgaacatacttgtttaggaagattgcattgcagaacgggcagaggtgctgcgcaacgaatcctatggaatcattattgattggtccccttaggggatgtttagcttgaattgcacctctcagtctgcgtgccatggccacactatgttcagctggtctgaacaaaatggtcagatggtagaaatggcaagaagtatggcaagagttcctattatctggaaccttggtggtatagtggcacctcaacctcaaataatatggcctgctgtagaagctaaacataaagatttgtggaaactattaatagctcttaataagatcaaaatttgggaaataataaaaaagcatctagaaagacactctacaaacttgtctttggatattgcaaaattaaagaacaaatatttaaagcatcccacacctgaccttaatgccaggaactggagtgcttaaaggagctgcagacaggttagcagctagtaacccattaaaatggataaaaacacttggaagctctgtgatttcaatgattgtgcttttaatctgtgctgtttgtctttgtatagtctgcagatgtggatcctgactcctgtgagaagtagctcactgtgacaaagctgcctttgcttttatcgatttgcaaatcaaataagggggacatgttgggaacaggcccccccccctcaaaacctggccataaactggcccccaaactggccataaacaaaatctctgcagcaccatgacatgttcataatggccataatgcccacgctggaaggttgtgggtttaccagaatgagggcaaggaacacctggcccgcccagggcagaaaaccgcttaaaggcgttcttaaaccacaaacaatagcatgagtgatctgtgccttaaggacatgctcctgctgcagataactagcccaacccatccctttatttcggcccatcccttcatttcggcccatcccttcatttcccataagggctactttaaatctaatatctatagaaacaatgctaatgactggcttgttgttaataaatacatgggtaaatctctgttcggggctctcagctctgaaggctgtgaaacccctgatttcccacttcacacctctatatttctgtgtgtgtgtctttaattcctctagcgctgctggggtagggtctccccgaccgagctggtctcagcagctgcctatagaaaattctatcccacttacctttcctttgtgaccagacccttcagtcactctttccaagtctctgactggactaagaaggccttctgtcatgttatttcttcctgtccctgtcaatatttctgccacaaagttgttttatcttctcttgcctgccccctgcctgccagtggctctgatcattgaattgcattagaggagataccaaagcagcatggctctccccagcttttgactttctgaagatctaggatgaagctggatcctaccccaaccgctggctgcaccctagctaggtatattaatatgcacagtggttgctggggttcttcagccatgcatgtgacctgaccttgccaaattaacctgcatgacctgcctgcatggtacaaggctcacagggctggagagtggaacaaatgggcaggctcattcttgttgggggcagggacatctcacagtcactgactcttcatgatgactgagtgaattagtctcctattgctgcttgtaacaaattaccgcaaacatagtggcttgaaacaacccaaatgtattatgttacggttttggaggtcagaagtttgacatggttttcactgtgctaaaatcaagatgttggcaaggcagcatttctttctggaggtgctgatggggagaatctatttttgttgccttttctagggatgccagcattccagggctgatgactttttccctttccaaagccagcaagggtcaatcgagtttcttgcattgtatcactgacacaaactctttggcctccctctttcacagttaaagatctttgtgatttcattgggtccacccagataatccagtataatttctatattttaagatcagctgattagcaaccttaattccatctgctacctcaattcccctttggcatgtaatgtaatgtgtttatagatcctggggattaggatgtggttatccttgggtgagggacattattctgcctcccatactgaatccaaagggcttagataatgcagaacaaattcacaactttatagctctctctcaatctggttccaccataaaaagtatttcaataacccatgccaaagggaatttccacatttctccttattctgttgtcaattcttaaattctcattctttttcctccaataacatctttctcattgtatgatgttccaaaattcagagttgtcatcaaataaatcagaaagcaataacactggcctaggagttattcagaagacctggattccagctgtgtacctggactcaaactgtgtacttggataaatcacttttggttgggggactcagtttcttcatctgtgaagtggggataattaataagatcactgacaacctctaaggctttttgtcatgttctgagaaggtaaacatacataagggatgttgaaagctattgcacattgtttaagctaatcatttcctatgactcattcatttgcaagagggacaccggcaaggtctttgttttcatctgtctgcttggatgtgtttctttgggccaatcctttccttctagggtctctatgacttgaaatagtacctcctctgggcttctctctggatggacctggctgtggcacatggaaacagcattgggtggcccttctgatatttctctgtagtaggacagggaggactgtgcttctcccaccctacatgtgttagggaacacaagcctatctaattctgggattgactgtgcccagtgataaaagctcccttctccaaaatcagcataattggggcaaaggtgagagtttggccatccatctttcttagcattttgctttatttttttcaattagtttagaacctgatcagagaagaggatccttactctttctccctatcctaccacctgccacctgtacagcatttccagagcagccctcatcaatgacctcccacctctggaagaactctctgtagagctgtgatctatgctggctccactagtccctcagcaggaatatgctctagttgccacagtgaaagcttgcttaattacttcttgggtgttacctgcacataaatcttagtctcagagtctgatttgggagtaacccaagctaagactcagatataagtccctgtgctaggcactgtggagaaagatagaaaacatcgttattgtgcttaaaacacattgtcttctggaaaatactatcagtatctccatacatagcatgaatttagaaagacagcaaattaaagattgatatcagattacaagcgccctggaatgctaggctcaggatttgacatgtattccgtaagcacttgaatttctagatattttgtaagcaatgaaatgtttcaggaagatccatcaatgatgatattcctatgcttaatatggatgagtatggatttcaggggacagtcaggagcccccggggagtgaaaagacaggttagaagagcattatgatggcccagctatgacttgctaagagataaagctggaaggagagctgccatgacttggtgtattgctgaacacatggggtggggtgagtggaggcaggatagggagaaagggtaaggatgatggtaacttttccctgcttggacggctgagagaatgatggaactgctgatggagctgggaagctggttggggcagagttggtttggggtggaaaaggacccactctgttgtctgtggtgttgtaacaaggtgattgcttcccaagaaactccagtgctacaaaaaatgaaaccaaaccaaaccagcattataaagacaaaggtttcagtgggacaaggggaatgggaacagtgcttactttctgtgacggttaatattgattgtcaacttgattggattgaaggatacaaagtattgatcctgggtgtgtctgtgagggcattgccaaaggagattaacatttgagtcagtgggctgggaaaggcagacctgcccttaatctgggtgggcataatctaatcagccgccagcttggctagaatataagcaggcagaaaaatgtgaaaagagagactgacctagcctcccaggctacatctttctcccatgctggatgcttcctgccctcaaacattggacttcaagttcttcagttttggaactcggactggctctcctttcttctcagcctgcatatggcctattgtgggatcttgtgatcatgtgagttaatacttactaaacttccttttatatatatttatattccattagttctgtccctctagagaaccctgactaatatactctcactttagtgagcatcagaatcactcaaggaattagataaaaatgcagattcctgggaccttgcccaagggattcccactcaagagggtggggtggagcccaggaatctgactttgtatcttttgagacagagtttcgctcttgttacccaggctggagtgcaatggtgcagtcttggctcacggcaacctccgcctcccaggttcaagtgattctcctgcctcagcctcccaagtagctgggattacaggcacccgccaccacgcccaactaatttttgtatttttagtagagaaggggtttcaccatgctggccaggctggtctcaaattcctgacctcaggtgatctgcccgtctcagcctcccaaagtgctgggattacagacgtgagccaccgcacccgggctgactttgtgtctttccatcaaatgatactttgcaccattttccctggagaattgtgtgcagttggttgataggtacacatttcataagggatggtttcagggctggtgagcctgagttgtagcaaaatcgtttttcctgcagaaattatgttatacaaaggaaggaggatgcttcctacacccgtctgtgtattttattactaaaatgaaaaatattaaactggctgaataaagagaaaaaatctaagcagcactgagaacaggggaaaaatttaagagttgaaaagatgaaaggaaaaaagatgactaagcagatcatcctaatgagcacagcttacaatggtggacagcaaccaagagaaggtgaccactgccccctcgaacagagccagtgatggcccgatgctggcctgcaactgttcacataaacaaaatgtgtgtaagatttgtcataaactgctattatacattttactttataaatttaaaatagagcaagggctggtgacgaggaataagttctagtgttctacaggtctatagggtgaatataattaccacaatttattatataatttccaaatagccagaagagtggattttgaatgtttccaacacaaagaaatgataaacatttgaggtgatggatatgctaattaccttggttgatcattacacattgtatacatacatgcatagaaatatcactctgtatgccattaagtatttacaattattatgtgtcaattaaaaataataaaagcaaaaaataaaataataaatacataaaggaaaggaaaaaataaaatagagcaaggacttctggaaatatctcatgcaaatgtatgcaaatgagcacaccaacatatgcagaaaagcaaaagcaagcgtgtcctttcctcttttgcacaaacaaaccctgttatcttattttaaaatgagctctgcaacaaagtctatcagaaacaacagcacatacgttatgtttttttatgacattaaagaacaggtgaaactgaactgtaatgatagaaatcagattggtggttgcctggtgggggaggattgactggtgaggagcacagaaggttctctagctgatggaaatgtttcacatctccacctggagggtggctacaggaaaagcctagtacatgttttcctgactggaagctgccctagttaactctcatgtggcttctaggtagtagctgcctgccctttctgctttccctttgtgttggtgccacatactgtcatgtggcatgcctgtatctgaagcacatgtggtatctgggggcatggcccagagatgggccactcagcagccccagtcttgctcacatctgggggaacagaactcaactggagaaacaagacctcctcttgccctccaaagattggtgagcattcctatctggagcaatgtcagcctgtcagagcctaaatgaggaaagagacagcctggcccagccccaccactcaccccacccaccatcctcacctgtcaatggcaatggccagcaaggcattggtggagacgtagagggagacggtgcgcaggtagttgacggaggcacagagcacgtggccatgctcccaggagagctgccgtaccacgtagtagtccatctcgaaggggcagcagatgatggccaccaggaagtcggagatggccaggttggcaatgagcagattggtgaggttgcgcaacttcttatagcgggtgagggcagcgataaagacaaagttaccgatgccgcagaccagcatgatgcctgccagtgcaatgccaatgacgatcttggctgcgaagaaggtccgggtcttggtcatgtcctcatcctcatccatagggaggtcataatcaccataactgaagttaaaggagagggaggaggcatggtcttggggtggattaaagttgggtgtgaaactggtgtttccattctgggctgccatggtgatgtctgcaagaaaagtggtgtgagggaggtgcgaggggtgagggtccagaccttctgctctttcagggtcagtgagcctagcaccctgcccacatccttggggagagttgactcaccgtcctggatcctggaaggaggcacaaccagtgggcaacatgcaggagaacatctggtcacattccctgagttccccaagtataggccaaccagacccactgcctaaccagatggaactacccgggatgcggggagaggagacctgagatctgtaagttgggaaaccctccgtggctgcccagctgtcaggaaggacagcataggatggatcagactgtccagaactctcaagaagaatgtgcacctttgccctttgcccaggggccagggcctctttgtctgcccagtcacatcctccagcccccaacacatcagctcccacaggggcttctggaacatttccaaggatgctcccatgagctggccaggctcctacagctgtcacaacgttgtggcacctgttggccagggacaatgaagcaggagggccaggatgctgcggggtcttctctccaaagcaggacaccactccttctgtactgaccaagccatagacttggaaatcaccaagttcactttcacatggacagactgagtcaccctgggccagtgatttatgctctctgagtcctaatcttcctgtaaaccaaattcctgctgcccagtccagtgcctggtgcatagtgggggctagacagacatctgttgagtgcatgaccagggcgctgtaggtggaggaggtggtggtggggtgggggaggggaattcccctgctgctccccgttctgtgggaaccagctccagaaagaaatcctctgccgcccttcccaccctactccaactttggatctgctctctgacctccttcacttggccctagttctccacccagagtcaaccctgcctgaaaggcaccatgtcctgtcaccaaggtctcaaaatagggaaaatagtctctgaagccctcagcccgcaggagatagggcaccccagggtacaaggcttcaccgaggggctggaaaaagagcccagatcccaacacctatagaaaggggccctggctgtccagctgtgagtggccttcccctcgcctctcagcacacctggaaacgactccacatgtgggcgccgcgggatgctgggtagcaaggagatgacccagctgaacaatgcatttggtccactcctgcgaggggaggagaacgccgagggacaggaactgcgcgccagcaaaagacaccctaacctggggtgcgcccgccagctgctttcccaaggtgaaaacctccaagaggcgagatgcaaatcccagtggcgtccacacccggaggtgtcttctctccaggtcgcccctccgtctcatgcgacaccccaatccccgcagcctctgctcagcgtgggaccaagaatggggagtcctacccctcctcggctttccagccccctaacccaagacaagagggcgcgcgcccgggctgggacaggtcccagccgcattttcgtagattgcactccccgcccgggagcgacccgttccagcagcccccttcccgccccatcaacgcggccgcactgtcggcgtctagaggcgacatcctggcaaagacaggaatcaagtcagaaattcaggctctagaagcaaaggctgcggtgcctcctggctggaagaaaacggcgggtgggtggaggatgcggtgcgcgggaatttccccacggacgcttgctgtttcctgctcacctttcaggaaggtgcccctctacctgcaccctcccctgcaatttggagctcgtccgcgagctcagctacccgctggctccctctgcccgcgcccgcacaccacagactccgcttaccgtaccctacccggtcctagagggcccagaggggatctcctgaaaccaactcgcctgcttggagccagccccgacgcatatctcgagagtggcgggaggcaaagcagccggaatgcccgagaaaaaagtgggcgtcagaggcccttgtcctagcgactcccccaccgcaccgactgagtcccgggactgcagggatctaagcccttacctgtctcggcgcctcctttctgtgcgctctgctgctccggaagccggatcgagagtcacagtgtggttgggcgcaggcgggccgctcggttttcacctcgaggacccggacttgcacttgcagagccgctgcgtgggggatgtccctcttttttcctcgccccggcgggctcctccggcgtgtcagggtctctgggttccagctggagttggcgctccggccccacagctctttccagcgtctcggacctgtgcgccccgccccgcgctggactccgccccggggtccccgcctgcctcctagtccaggccaagggtggatgcccagctcccccaccccaccgcgtgctctcgggctggtgcgtccagggcgcgggcaccgtagctccggccgcgctgacgcgagtccccggcagcgggggcagcctctcgcacggatttcagcgccttcgcatcccgtctgaatcggaccacacagtagccgggtttctaccgtgcgcttgggaacagtgagcaccgccctctgccgccagtcgtggcaccgcacccgggtcgcgcgcgcaggaggggagagtcctgtcttccggaggtgcccagtgccagcgtccgcgcccactagaaggtgaccctttcaaggaaagcccggctccgacgagtgcggtgtgggcctttggagatggcggtgaaggaggaggcccccaggaggaagctggggatggggacagtttgctctgctcaaagcccctgaagtcctcacccaaactttgcgatgaccaccactatcagattccatggccgtataaagacaatcccaggagtgcctcagcccatctgtccggagagtctggagcccttcactttgcttctgacaggttcgaaatcctcccacgaccttcctggttaaacacaggaactgcccattcaaatgactggtgcccaggaagctctgggcatacaggattgaacctgtggcaggaccctgaaggtctaaaaaggtgttccccatcgttaaaccccagccagcggattattggcaggtgggaacatggactccactttgtcagagcttcccattgttttcaagagaatctggaattcgagaactttaaaaatagtctttgggttcgttaaagcaaaaatcttgttttggtcaaagagaacctgtctcagactgaacacagtccacaaggctgccaattaaaaatttttggataaatgaacttcaaactccttcaggttgtgacattctgtgattctgcttttcccaccttacctggaacctgaccccactctccctacctcttagcatctctcccgcatgatcaaaggcaagagagccagctgtttgctttcctcctggggaggggctgcgattgggcaggtgttctacatgctcagggcaacttccagatatggaggcaaaaaagctctgttgcttgagtgggggagatgatggggtggccagttgtacgccctggacacattctttgcaatagtgcatacttaccaacttcagctagaggcttcttcgctcatggaccatgcctgccctattcaatgggggcaaacagacccctgggaccatctgcccgctggtgctttcatggaatcctctgagatgagttaaggcatggttgcttccacacagatctggcgacccacagatgtcgctgtagtaactccaagtcctgaccaccctcagcagagtaggagctttttctggggatggacatgtggtccccagggagacagtgggtgcttagaaaacagtgcaacagagtgctacggggagttgtcttagtttaggtttcccccaaggagactcccagacaaagacctgagtgcaggtagtttattgggagcagatcccgggaagcacacacagggggaggggaagtgaggcagggaagggagaagggcccatacacgatatgctaacgagcagggtgccactgcggctcactccagttgacctgcagaccgtgtagaacatgcctcatggttgttcacagcagcgcggggaggctggacattcagccatcgattcctaccccctactgatggacagattccctgagagccagaatttccctcacttttgagttgtgtcccggtgtggtgcagaaagcccaaggctgaaaagaagagagcttcaggccttggatgggaggtgtcatggtgcctggaactgcatctgcaggtgagcagaggagattctgggcaggccgtcactctcacatctgctacaggagggcagcagaggggacattgcctttgatgaggcgggcaggagccatacttctgctggagttcatagactgaactgggtgtgaacccagagaaactgggtgggctgagtgggattttgagaggggctggagactttgcattatatacttggaggcaacttacatccccacttgggctcacaaagctggcaagaactggggaaatggagatgacttccccttctagtcaaagagatttctctaattgcaagtccaaagtctcttcttgtctctgaaagagttttctgtctgaagtctttctgggtgagggaggcttagctgaactacatgataaagtgctgagggaggggaaaagggaaaggggaggaaagaaaatccatgcaggcaggagttgctgcagagcctcaggggaggcattatctacaaacaactggatgtgaggaaaatggatgaggtaaggatactttgatacagagccagaagattatatgtttgaatccactcaagagacacgaataataaaaatttaacaggtataatatttcgacaacattaaatctgaatgttttttgttatttcccccacgaatcctattccatggcagccactccactagtataaatccaggagattggagtgggttaacaccgcctcagaataacatctctcaaagatactccctaaaagggagggttgaattgttgggtcagcctgagattgccagatggaaccacatttaggatcccctctcccactgcactactcagaatatgtgtcagcgtgtgtataaaggggacagagaactcagggtgtgtcaggtaaatttgattttcaggtaatttcttttaaattacttttactatttatttatttacttatttattttttagagacagggtgtcaatctgtcacccaagctggagtgcaatagaacaatcatagctcactgcagcctcaaactctcaggctcaagtgatcctcccacttcaggctcctgagtagctgagactacagtctcgagccactgcgcttgaccccagattttttttttatttttatttttactttttgggaacagggtctctctctgtcacctaggctggagtgccctagtgtgattgtggctcactgcatcctggactttccagactcaagcagtctttcagctttggcctccctaacagttggaaatacaggcgcccaaaaccacgcccagcatttttttttttaatttttagaaaacaaaacaaaacaaaaacaaaaacaagaaacgaagtcttgccatgttgcccaggctggtcttgaactcctgggctcaagcgatcttcctgcctcagcctaccaaaatgctgagattacaggtgtgaatcacagcacctggcccctaaattacttttgacatttgatttatgtttcttgaaagtgactcctttctaagacaaagccacatggatcttcaggtttataaaggttttatatgtaaactttcttaattgtaaagaaatgaatacagattctctggagcttgattttccaatacatattaaaaagccttgaggctaggcagagtggctcatgcttgtaattccagcactttaggaggccaaggtggaaagatggtttggggccaggagtttgagaccagcctgggcaacctagtgagaccccgtttccacaaaatttttttttaaattagctgggcatggtggtaaatgcctgtggtctcaactacttgggaggcagaggtggaatcacttgagcccagaagtttgaggctgcaatgagctatgatcgtgtcactgcactccagcctgggcaacagagtaagatcctgtctcaaaaaaaaaaaggtcttaaaaatatacctctcttaatctttaatccagaaattctatttttatgactttattctatggagataacgaatgaagcaggtaaagatttctctacaaggatattgatagtagtattgtttaggataacaagaaattgaaaacaacactattctcaagaaaatgacctcaagtgatttttgtgcgtgtctgtgtgtctctccaggagtaattaatcagcaaatcaagaatgtgcccttgttattgactgcagatatatcgttaggtaaactttttaactttgaaagtaaatgtaattaaactctacgaatcctaggtggaaaaggagaagcttaattaatggttcaaggtgcattgaccctggcactacctttccttccatccagctggctttcatggggttctgcagagtgactctgtaggatacacctgctgactcacctggcccaggtatttttccctcttcggcttccatctgcctctaggggaggaaggtgatagtcaagactgagacaaggtatcagggtcagtgcccgccagccatgctccctgtctatggagaaagacccaagaaaaaggtaagcttacatgaaagctagagagcttttggtcagaaatttgtaattgctgttaaaactgtttcaggaagttttccgagccctcagagagaggcggtggtgggaggaaggtgggttgagagagcaaagttcttgcaagaagcagctcctcgatgcattcaaaactggattctatgatggcgagtttggttaatgaaatcccttcgtggaaacgaccttgttcactggcagggcagatgaaggacaggacggtgctttaactaataagaaagactgaggcttccaagttcagatccatgtttggtagattatagaaagggtttggtttttttgtttgttttttgttttcttttttgagatggagtctcgctctgtcgtccaggctggagtgcagtgctgtgatctcggctcactgcaaactccgcctccaggttcacgccattctcctgcctctcagccttccgagtagctgggactacaggcgcctaccaccacgcccggctaattttttgtatttttagtagagatggggtttcaccgtgttagccaggatggtctcgatctcctgaccttgtgattcgcctgccgcagcctcctaaagtgctgggattacaggtgtgagccaccgcgcccggccagaaagggtttagttttataaggaggcacttgggtgtcagtttatgttaagcctcatcttctctggcttgtcctcttccagctgaagcccctctctccaggtgttcacatgctgtcttgccctgagctcaggaaaggatgagaaccccctccttcgcctgaggtcaggggcaggggcgtttgggaacactcaggtgggaaaaattcacatagtgtagacatttggaaagtaaaaagtcaaactctttgcccgctttccacaatgcagcccctgagaggtgacccagttacctggactttactacataagttccaacgcaaacaaaacgggctttgggtatgcttgggctcattatgggaggagtcaggagagagagaaagccattttcactatgagcaacatagagctctgagttaattaacttgaatattttgaaaaacgtgactttggcttgtgccctgaggtgtcttgggttggatttccctaaaagcagatcttgagacaaagatttgagtgatgatgtttattgttgtggggcggggagtagggttagggtttacatcctgagtctagagtcacgagttggggcaattcaccccacgcatgatgggtgcgtgctgcaaagtgacctgcaaagggcatggatgtggggagaggtgaagaatgggtccaaatgatgcaatccccccacttagctcccccgtcttggatcccagagctgcctgccttgctccttcagcattgctttgattctgtgagccaccttattgcttcagtaatttctctttttaacttcatttgctcagagctgaattctgttgcttactatcaaggaatcctaacagattcagattcagacaggttaagttttaaatgtcacacagctagctggtgggtggcagagttgggattcaaaccagactccaaaatctaggcttcttctactgcactgacttgaatgaaatcttcctgcctcaggaggagtgtggtattgaagtaagaactggaaaaaaatgggagaggaatgaataagcttcccaagacccacacttgcccctggggccaagggcattccagcccagatggcctggtattgacagactgtaatggcggctctcaaactggtgtgtgttttgagacctttttcaaaatacacatgcattggccccatgccgggagattcttattccacttatcaataacactttcttggcttctttgagtattcattctttaccaagtttcctatcaaaaagaaaaaaaaggaaaactaaaaacactctgatggaaatcattgactagaagaaatgggccttaatgaatcctgcctagaaacagcagaacatcttcccaacagaggggcattttgttttctctcttgtaatattgtgtatcagccaagattgtgtgactgcttttctttcattttaaaagtaaaacattcggttttggggcttttctcctacatttaattcagtttgtacattttttgaagctctaccagttgaaaacatcactaaaaacacacacaagctgggaagagaaagttaaaagcagtgacaagttcatcatgctgtttttgaggaccagctctgtgtaacacacgtggcttgcaagactttgaaaagtgaaggctggggtgtagctgatctggggcaaggatggggagatgagagatgccaggttatccaaaggcgtagcttgttcagggaactgggagtagattttgagaaactacatgcccaataaatggcctgaatcacacacatgcaagtcttttaaaacagaaggtatctagcatttaagttcagaaatcctttggtagggatgagagctgggaggtgctggggtggcttgcagcctcaggagttcacattgtgcagctggtggcacatttttggcctctgtatcatttgagtttgaactgggaataaagcctatagctccaaaaccttactgttcccatcgcagacatcctcagtggaagagataaaagatatccctagacaaaggcatccagggccatgggacattggtgctgtgctatcctttgagggaaatggtaaatgagagttggggagagggtgtgtgaaccagaattgcacacctgcttccagccacatcttatgatacatgcacccgcttcaccacacaacaccatccgtgacccaaggggactctttaggagggaggatgaggatatgttatgggtaggaccagcgggggccactgggtttctgtacagcaaaagcaggactggggacagaaggaggccccacacaggcaaacgtcttttttaacttgtaggttcaggggtacatgtgcaggtttgttatatagctaaactgcatgtcacgcgggtttggtgtaaagataattttgtaatatgcataagtatccgataggtgtcttttctgagcctctccctcctcccaccctctatcctcaggtaggccccagtatctgctgttcccctcctagtatccatgtgttctcattgtttagctctcactgataagtgacaacacatggtatttggttttctgttcctgtgttagtttgcttaggatagtggcctccagctctatccatgtccctgcaaagggcatgatctcattcttttttatggctgcatagtaccccatggtgtatatgtaccacattttctttatctagtctgacattaatgagcatttaggttgattccacagacatacatttttatttgctgagccccagcctcgtaacggagagacccagctagagatgagggtggagtgaaaggaggggaaaatgtagatgagagatggctgaggtgaaactttataaataaccatgttataaaacctcaaaaggtaggaagtgaagaagtgagccctccactgacattgtccacgttggattgccccacgagattgccccttcttctggttctattccatgctaccacctcctcaatgtttgtttgtttgtttgtttggacggagtctcgctctgtcgcccaggctggagtgcagtggcacgatctcggctcactgcaagctccgtctcccgggttcacaccattctcctgcctcagcctcccgagtagctgggactacaggcgcccgccaccacgcccggctaattttttgtacatttagtagagacggggtttcaccgtgttagccaggatggtctcaatcttcttacttcgtgatccacccgcctcggcctcccaaagtgctgggattacaggcgtgagccaccgcgcccggcctgtttgttagttttttggttttttttttaaacagcaaaagccctccctgatattcactgttttccccatggcacgttcattcccacagaatgctcttggcatcatgacgtgcaaagctagagtttagactgcaacttccttgttatttaatgccaactaactaaatctgagtctctggatattgaatttcagagagttctgaagtcagcatctccccatttacttctgtgcaccttcccaggctagttaatatcacaacctttctgaggcctgtctggtgggttcaagttttacaggctgggggctgacttctattttatgtcttgaggtagtgattgttgctatttttcttaaagcagacaggaacagctcttgaaagggacattgtgcacatgtaccctaaaacttaaagtataataataataaaataaaaaaataaagaaaggaacagctattaattccacgttttcctttgcaggcagcactttaacactctaagggggataatttggcaattggattggtttagacaaaagtctggcaactcccagaactaaatgatagagtctgtcatctgtgcctgatggtcgctcaaataggctactgtagttattatttttccccctaagctcttttagcctcaccttaaaaactgttactaatgaaaatggcacatcaaggcaggcaggctctccaagaaggcaattcttgtaacagaaaggtggttaaaatctagatactcagacaagtgaaaaataccttggaatgagaaactgcaatgtgttagcagtgattgcttctaggtggtggagttatggaggaatttttaatgttcctgtttttaaactgatgcacagaagtcatgaattacttgtgtaacaaagattgcatacataaaaaacaaaaacaaaagttagatatgtgagaccttgtaaacaacgcatttcattttgacacattcagtgcctttgaaaatttaactggggaatgatcaaaccccaggtagtttggaacaaatattttctaatagccaaacaactggttaagagccatcttgtcaaatggttaaccggtgtaaagtctccttgaagaaacagctgagtatactggtgaaccctccataagtcagggggccccatcagtggggttatactgaccaggcataggatgcaggcagtccatctcaaagatgcccgggaagtagcttttcacaaagcctttgcctcaaggaagcatccttctttgcaaccaccagaaatgcacttaaatccaagctggggagaggaatctggggtagatagctgtggtgtgtgtcacagaacccaagtcaggactcttggggacccagaatcacagcttgagggtcatcctagctgcttgtgtctcccctctctgggggctctgcctggttctctacatcttaattttgtgtctgctccgtccttctctttccctgtgccagacccaatttggacagacttcctagttttaaagcccaggaatctgacatgcctaagagagagagagaatttaactgacccagctgggtcaagcatttacccgggtagccagtagcccacagggtgcatttgtgttacttgaaaagggcaccctttcaccaggcagatgcagccctgagccagtgctcacaacctaggcttctcttgcacctacccactcctctccttgtgcagagcacaacccaggcaacagcccatgacaacgcttgtccattgtcgatccaattagctgtggctaattggggtagaggctggcagattcacatagtgtcttctatgcaggtgggtggggagggcagcacttctctcctccattcccgtgaacagaaacagctctagaactttcccccctacccttctcaggcagagcatgctactgtggggctggaggtattctgtcctggcatattccattaagaaactgcaaaccttttttgtaagtgtggaggatatgattgaatagaatcatagataaatgtgttactatgtatagctaaaggaaaaaacagagctcgtgtgggctcaatctgtaccatcaaataaatgagtgaaatcaaaggtaattttttgggacttaccattgaaaaacaagtggtttattataggaaggaatagacattcttctttgagaaatttcatttcagaaacttgaaacacctaggaaggcacagggtcctgtctgccaggagaggggcaggggtaggtggaggcatgtctagatggcttctccagcccccactccctaccctgaatgaggatatccagctcagagaaagactatttgtctttgaactctgttagaagcccttccctataaagtggcacatggctttctgaaatctgtttgtaattttcagccttgttcccatatcagacataaaaacccatctgcatttttccagaaatccgctggtgtcctctgcatcacccaggcctcacttccccctcctgtgcttgatgagactccaggctgtgtcaagggcccctgattctcttttcgtctctccctgcaagagcaggcttgcctgatgggtcattattcactttaaaactaggaagactggccaagctgggtttgaggcagggaaagagaaggatggagcagaaacacaatgaccagtgactgggcttcttttctccgctgttctggtgacatggaacttccattgccactgactgcccttccctcctctcctcaccattcctttagacccaatattgctgggcacgtatttcaaaatgtcatcctattagcctttgtgaaatgacaaggcattttctcttcttatagttggaggtcaacatacttataattgaccttagactattttttgagatattatggatgctcctaggttttctatttcagattgtattgtgtgtttactgctacaaaaataactaacttgattcagtttaaggctcacctctgggctggataggacactcctggcagggaatatctatagtcacactagcaacttgggcgaaattggtcgaatcaatcttatttggagcaaagcgtctgcaaaggttcgaaatttcttctaacttcccaccctagtgtgttattttctttctcagagaatatcgggctatacgtcatgtcttacactgtaggtgtgatgtgacttaggcatctaactattcagtggtgccttggaaggttgtaaaagtctagagagaaaaatagtttggcctattttagagatgtttggttttaaaagctgtggagaatttgtaggagccaggttgtaaaatgcagatgaaatccctgagcaacaaaagacacttatgggaaagtcacaatgtagacgcaatgactttcgtacacacagtttaggagttttttcgttgagccataaaattgttgggatgtagagtccaaggaactcagaatagcaagccaagaataacattcatgaagagatttaaaaatgctttttgccaggcaggaagtgatggaatagagaatcctcagactggagagagttattgagaaaatggttcagtcatttaatcttctaattacacagttggaaatcttctggagtgttttggtaagtgtccagagtttaggaggcacgctggcagagaaaaaataatctaatgaagcattattgaacaattgtgaaggttggtcatcagagcactcattttatattaccctcactaggacgtgaaattgctgtgagtagaaactggagatgagtgaacatgtcttcttatgcttctctattcttatttctctcaattactcaggctgcaaaatgacttacatcttacacctgaaaacacgcttacaaacaggcacgcttggtggctctggttctctgccttagctgtacattgcagtcacccagggagcagtgaaagaaacactgatatctggagcgtaatcccagggattctgacttaattggtctggagtgtggcctggatttggggatttttaaaagcttctccaaatgattctaatatggagcaaaatttgagttctcctattatgagattttcttacaacttttttcaacaaatgtgtttgaggttggcttgattggtcttcattgaaacctggtgtttctttttttcttttcttttctttttggagacagtcttgctgtctcaggctggagtgcagtgatgtgatctcagctcactgcaccctccatcttccaggttcaagtgattctcgtgcctcagcctcctgagtagctgggatgacaggtgtgtgctaccacgcccagctaattttttgtatttttagtggatatggggtttcaccatgttggccaggctggtctcgaactcctgacctcaagtgatccacccacctcagcctcccaaagtgctgggattacaggcatgagccactgcgcctggccgaaacctggtgtttctactgaacagtgtgtctatgttaacccaactaaagaagatttagaagttccaatgtatctttcagctgcacatatgcctcttgtatgaaaataagtatgtatatagaaattcacaagatgttgattttaagtttgatatgttaactgaaaaatcacaaggtggtcttaaatttggagaggagactttatttcttataaagggttacagcctgcagggtggccattctgacaggctgggaagcacagcctccagcagaaagcaaaggcgggcaattcatgggagggaaagaaagatgagaaagaaatttatgctgaatgggctggccaagtatacacattcaacaggttataggaggcactatggatatacacgaaggtggtcgtaactcatgcatgataagcaaacatatgtgttacatgcatcccatgttcactttgaggtggagacttaacatataagtgcattataattaggcactatccatcaaagggtgaaacagaggcatgaaggcactcacgtgtgcagcctctgtaaaccggccagaaccagtccgtagtcagtggtctcttgcagggcgaggttactgaaaccagtctcttgtctcatcaaagctgtagttatggcttgtggaatagggggttagttagtcagcgtctggtggtggatgagctgcaaattgttttaatattgcttatctcaaggccagtgatcgtttagctgctagagaaaaagaaaaacctcgtggcagttagaaattgcttattctttaagtgtagggagaggtccatgatgtaacctttgcctggcatggcctcaggtcttcttaataatttgtatcttattgccacaaaaagtccattctgtcagtttcatgatacctatttgaatattaatgctggtcaattgttgtttccaaaccacaaaagggagggaatagaatgaggagtgactgacttcccatcccatcacagctgggaactcaggttttaaggtttctttggggttcccttggccaaaaggggtccatttagttggttgggggggctttagattttatttttgtttcttatttcccccttttggctgagatttttcagaagcagattgattgccaaacttttatttttgttccatatcattgcccggatggtgtggccacctgctctgaatccatccattctgttggtgggacccctatgttcaaaagacttacagccaaagatgtacagccaattcacattccaggccatatgggaatagaggtgagcaggcacttattaaaatttttaaattttaaacccttaaattttctaagcagcgtaagagccgaaaactaaaagtcaaaaaagcaaacttataaaattaacttatctataagttttattcatcgagccagacttgtagcaattagctttataaaacagaagcattttgttaaaaccatttgagctaaggaatttagagattttttgttgtgccgtaatgccttctgtgatctttttagtaatttgttctaagtgactgataaaattttttttatcatatctctatttgtataaaccccataaccaggaacacctacaccagtaggctttgtcaccaggtatctcaatgtcgtcttggtaactcttctttaagtctatgggaagcaggaaattctttatggtcaggatggatggaaagaggccacatagtggcccaggaggcaaagtccttcaatttgtcagctatttaggcgtcggtgtgcctgtttttgatttggagggtctgaactaattttacccctcaaaactggagtctcatgtgtccatctctttcatgatagtccctgggcctagagggagggtacttggtattgtatagcattaatagcagtgtgttggcaatggataacatattgggtccagcgtgattgaatagttttcaaattttggagacaggtagagagacaaaagtaaactttgttactttatctacttgctgtaagccagtggtctcccacctttttggtaccagggactgatttcatggaagacaatttttccacgggcagtggggtggggaggatggtttggggatgaaactgttccacctcagatcatcaggcaggcattaggtgctcataaggagcatgtaacctagatccctggcatgcacagttcacaatagggttgacactcctgtaagaatctaggctgggctgatctgacaggaggcaaagctcaggtggtaatgctcgcttgctggctatgcagcccggttcataacagaccacagactggtatcagttggtggcctaaggcttggggatccttgctgtaagctctgtttagctcaaaagaaaaaaggtgtttttttaaaaaaaaattattattttcttagagatggggtcttgctatgttgcccaggctagtctcgaactcctgggctcaggtggtcatcctgtctcagcctcccagggtactgggattacaggtgttagccactgcacctggctaaaaaaggttttcttgactctgggaaacaaaacataaagaatcagcaacatttccaacaaaaagttataagctttgtctagttttgacagtgacaagaaaaggaagctcacagctagctaagcatttgaattatgtaacatcaaaacatagaacaaattgtaataatttagaaagaggcaaaattattaaataagtcttaatatctttgaatccaggcctggccccgtgtctcataacagcagttcattttgattgttgccttcttccgagtctgaagatgaggttttggttcacttgagtttggtgtcagataccggtattaatatttgagattaggtaggagtcagtacactttcagataagatatgtgtacccaggagtcgactccctgtaacttagcagcactaggattagttaatagcacctggtgaggatccttttggtggtactggagggagtgctttaactgatgtctcttacagtatatgtagtcatcgggctggaggtggtgatactggagttcatgacctgactagaaactgaaaaaaggttctaaacgttttcagctcccagcaataagtgtaagttagagacttaatttaggatttaattttgaggacatttgtcaaagatgttaaaagcctcaaaacatttcatcaaaacagaatcacaggtcattgtaaaataatagttattcatttaaccaagaatgataatcaaaagacctcaaagacaatacagaaaactacatggatgtaaaccttagcctttttaaagcttagttttcctaagcaacaaaaaacctgataaaggcaacacaggattgggcatggtggctcatgcctataatcccaacactctggggtgctgaggcaggaggatcccctgagcccaggagttcaaggctacagtgagctgtaactgtgccactgtactccagcctgggtgacggagcatgactctgtcttaaaaaacagaaagactaaataggaacttatcttaataaaatgtaaaatattttgtcattgctgtatctcgtggccaatccactcatctgaactttctgctgattgaattgtgctgaatggaaaagacaaactttttggtaacaccttgaaattcacttttagaagccttgatcagatctaattctaaatccattttcttctgcaaatttcaaatcttcaaatatatacttataaagtacttcacttttcccagtccttaatatataaacaagcaaacaagttctagagttattgaatccaaaagagcatgaattgtatacagttgataaaaaaaaacagtgaggagagttttgaaagtgccattcattcaccaaaatgaactatgtgctagtttttctatgttacatttagtggtaaatataagaagtctagattcttcaacagtcaaatccctaatcaagaatagattaccatttaacatgttaactctggaggaaccgcaatatcaggaagtgtctttggttcagaaggtcactgagcttgttgaattctttttcattttctgatgaagggcattttttaaaaaggctatgcgtgaaggggcagaaatcatacatgattaaataatttggcaggggagatttcttatatttttcgcctgtattttcacttctatgatcaagttggcacccaaaattaattccaaaaatccatcccttgcaaattggcacccatatgtatcttcttaaaccacacttaatttccaaatgaaaacaatagtagggtaatagtttcatctaagatggtgcaactatcccatgattgtgattttttgggattttagacgttaaggattttagactttagggattaagattttaggaactttgatattgcagcattttaacatttgggattatgacatttgggattgtgttttttggggattatgatccaaacaccactgggcatgtagtctcatccttgagcaggctagcctgggttcactcacgtggtggtcttaaggtttcaagagcagcaagaaggcagccccaatgtacgagcacttcttcagtctccgcttgcatcctttgatattgtcccatccgccaaagcgagccatatggccaagttcagggtccatgttagaacgcactgccaaagaacgaggggtactggaggcctaaacaaattagattcgttattgcaaacagcctgccaagggggtctgccaccttgatgccaccaattctcccagcttctgcattaccttttattttaatatgagaatagaatggctcaagccttcatctcataaactctgggtatccctttattccccttcctggtatctccaaaggtccatggtgtgtgtgtgtgtgtgtgtgtgtgtgtgtgtgtgtgtggtgtgtaaaggaagtgatgcaggatagggggcacttctttttatttttatttttaatattttaagttccagattcatgtgcaggacatgcaggtttgttacacaggttaacatgtgccatggtgatttgctgcacctatcaacccatcacctaggtattaagccccacatgcattagctatttatcctgatgttctccctcccgccacaccccccacaggccccagtgtgtgttgttcccctccctgtgtccatgtgttctcattgttcagctcccacttataagtgagaacatgtggtgtttggttttctgttcctgcgttagtttgctgaggataatggttttcgactccatctatgtccctgcaaaggacatgatctcattcctttttatggatgcatagtattccatggtgtatatgtaccacattttctttatccagtctataattgggcatttgggttgattctgtgtctttgctattgtaaatagtgctgcaatgaacatatgtgtgcatatatctttatttataatagaatggtttatattcctctgggtgtataaccagtaatgggattgctgggtcaaatggtatttccggtactaggtctttgaggaatcaccatactgtcttctacaatggttgaactgatttacattcccacctacagtgtaaaagcattcctatttctccacaacctcgccagcatctgttgtttcttgactttttaataatcaccgttctgactggcataagatgatatctcattgtggttttgatttgcatttctctaatgatcagtgatgttgagcttttttaaaaatatgtttgttggccgcatgtatgtcttcttttgagaagtgtctgtttatatcctttgcctactttttaatggggttctttgcttttctcttgtaaatttttttaagttccttgtagattctggatattagacctttgtcaggtggatagattgcaaagtttctcctattctgtagaatgtctgtttactccgatgatcttttcttttgctggaacacttatttttctcctcaatattcttgcattaattttcttctttcacagaattgtcaatgaatcatgggtttcactccaccaccagtaattgctcttctccttccaggcttcagccttgaagtatcagccctcagattacttgctaattataaaggaggaaaggtagctttatatgggtgttatctagaggccatcgctttagctgaggggtcaaactttgcattcccaaggctgtggaacatggcatcatgtggcctctgatgtaatgcactgagaagggtacaattgcaggtcctgccaaaaacacatacactgaatcttgtcatgaggaaaaagccacacaaatacagttgagtacattatgcaaaaactggtttggacccttcaaaatgcccatatgatgaaagacaaaaattaatagagaactattctagatggaagaactattctagattaaaaagacatgatgaaaatcagataaaatatgtgagtggattctggatttaaaaagaaactttaaggatattgttgggaatatctgggtaaaatttaaatataaaccgtatattcaatattgttaaattgatattaattttctaaggtgtactaatgatattgtggttgtgtaggacagtgccatttgaagatacatacttaaatatttaaaagttaactgtcatgatgtctgcaatttacattcaatgagtttcagcatgaaaaacaagtcaatatgacaaaatgaaagtgattggtgagtctaggtaaatggtatatgggtgttcattatactattcttttaattctaatggtttaacattctaagataaaactggggaaaatattttggatatttgcactaaggcttaaatgatagactttcattattgatcagggtctgagttttctgagtttgcctttaggcaaaacaacaacaacaacaacaaacaagaacaagagcaaacacctcagagttttcctctgaggaagtgaagaagtatcacatgtcaggatgtctttgtgcacaactctcctaggaggctggggaaaggccacccccaaaagacttgctccatccctcccaggggcatctttctgtttaaagtcaggacttctctgccgtgtgcagaccactacgcctgagctcattttgggttttgagttttacctcagaagctgttctgtgcttccttctattgccctttctgggaatgtcttggggtcatgttgctttggtgctttgtgccatcctccatgaaaccacagggaacacaggaactgtcattatctctcctcaatccctctgcttctcaaaccactcatcctagagtcagtatccaacaggaagtggatgctgtttggtgaaactctggctggctccacggatcaactcaaggtccacatattatttcacgaagtgaaggcatgcgtttcttacaaaaattattccaaagcaagatctgaaatttccaattaaaaaatttctggaagatggcagaataggaagcaccagaaatctgtcttcctacctaggtaacaattacattggcagaatctatctggtataactattttggaactctggagtctactgaaggctttccacttccaggggaaggttttagatgataaattgcagttaattttggccaattttagctcttagcacagtagctacccatcatccacccctaagccccatggcaggcagccatgcatatgttcctggagcaggttgcatgcagcctttggaagttggagtggacaaaaaggaccttgttctctaaatattggggatccatgctctcattgctgattgctgcttccaatcacagagatgtagacaaagaggtggcacccattattgttgcaccttcccccattgctgcaagccctgccttctctggctgaagcaacttcctgagggtttaaagagccagcatcctttatttttaccctttcatttttcttgttttcccccttttgggaaccagacactagaacctagtctgaggactaggacattcagaagcaactgcatatatggggggaatagaaagtcaccacacaggttcagggaaaggcataggctcagagacgatctgagaagactttaagtttatacctcaggctgatctttaacccagagacagctaccacaatgcaaataagaaacagaaataaaaatagaaatgctaaggaaaagggagaatctgatttcctgaattacattattagattcaaatgtcctgttttcaacaacaaaaacaacaacaaattacaaggcatacaaaggaacaggaaagtagggttcatttaaagattaaaaaccaaaccaacaggagttatccctgaaaaatacctgatggcaaagtctttaaaacagctgtcttaaagatgctcaaaaaaccaaagaaagacatggataaagtcaagaaactgacgtatgaaccaaatggaaacatcagtaaagagagagagaacctaaaaagaaaccaagaagaaattctggcattgaaaagtacaataactgaaatttaaaattcactagagggattcaaaagcaagtttttaaaggcagaagaagggattagtgaacttgaagatatgacgatagaaattattgagtatgaacaacagaaagaaaaaggattaaggaaaagtgaacagagtccaaggggcctgtgggacatcattaagaggaccaaatacgtattatgggagttccagaggagaacagagagagaaagggcagatagaacatttgaagaaataatggctgaaaaattcccatgtttggtgagagacatgaatataaatatccaagaagctcaacaaactccaagtagatgaactcaaagaaacctacactgagatacattataatcaaactgttgaaagacaaagacaaagagagaatcttgaaaacagcaagagagaagcaattcatcacacagaagagattctcaataagattattaacagatttctcatcagaaactttggaggccaaaaggcactgggcttatatattcaaaatgctttttttaaaaaaccactataaaccaagaattccatatctgacaaaattgactttcaatattaatggagaaattaagacattgatagaaaaagtaaagctgagggaattcattgctactagacctgccctacagaaaatgttaaagggagtcctacaagatgaaacaaagggacactagacagtaactgaaagctgtatgaagtaataaggatctcagtaaaggtgaaaacatgagtaattataagagctagtattattgtaacaatggtgtatataactccacttttttttttttttttttttttttttgagacagggtctcactctgtcactcaggctggagtgcagtggtgtgatattggctcactgcagcctcaacctcctgagctcaagctatcctcttgcctcagcaccctgagtagctgggactacagacatggcccccatgcctggctaatttttgtattttttgtagagacgaggtttcaccatgttgcccagactggtttccaacttctgtactcaagcaatctgcccatctcaatctcccaaagtactgagattacagacatgagttaccatgcccagctatactttttgtttttgacatgatttaagatactaatacattaaaagttattagtctaagagctaatatagtaactttggcttgtaacttcacattttattttctacatgatttaagacatcaacactttaaaaaaatccttagtttaaaagttaatatcattgtaactttggtgtgtaactccacattttgttgtgtacatgatttaagagactaatgaatcaaaaacattatcagtttatatttttggacacataatgaataaagatattgtgataactgaaaaaggtgaagatggagctgttaaagaagcagagttttgtatgttattgaagataaatcagtataaattcaaattacagtgttataactttaggatgttaaatgttatccccatggcaatatatcctcaaagaaaagagctaaagaatgtacataaaaggaaatgcaaaaagaattaaaagattttactattaaaaaaatcaatgaaatgcaaatgaagataataatgcatgaaacaggggctaaaatagctataaggcctataaagaacaaatattaaaatgacagaagtaagtccttgtttattagtaattactttaaatgtagatggattcaactcttcaaaacagagatcaaaaaaatagattaaaaaaatctaactatatgctgccttcaagagactcaaagattcaaatagatttaaagtgaaagaatgaaaaagaatagtctatgtaaataataaccaaaagagaacagtggtggctgtagtaatatcagacaaaataaaatttgtaaatcaaaaaagcttacaagagacaaagaaggacatctcaataaaaggttcaatatagcaagaatagataacatttaaaaacatttatacacctaataaaagaccatcaaaatataggaagcaaaaatgaatagaactgaagagggacatagttatataataatagttggggactccaatatcttattttcaataatggacagaacaaccagacagaaagtaagtaaggaaatagaaaacttgaacaatgtaataaactagatttaacagacatatatggaacattgtacccatcaaaagaaaacacattcttctccagtgcacatgggacattctcatgggtagacaatacattaggccacaaatcatatctcaatagattttttaaaaatagatatcatataaagtatttttttctgatcacaataggataaagttaaaagtcagtaacagaaaaggaatagaaaaattcacaaattttgtggaaattaaacaacacacttaaaccaccaatggaccaaagaagaaatcacaagagaaactagaaaatacttagagatgaatagaaacaaaaacgcaacataccaaaacttacagacacagtgctaaggggaaaactttgtcactacaagtgcttacattaaagaaacaaggaagactttaaatcaataatctaactttacaccttaagaaactagaaaaagaagatcaaacgaaacccaaagctaacagaaggaaagaagtaacagagagtaaagcagagctaagtgaaatagagaatagaaaaataatagataaaatcaatacaaccagaaattggttcttcaaattgataaacaaaatgaaaatctgttggctagatggactaagaaaaaatacagaagggtcaaattactaaaatcagaaatgaaagtagagctattactaccaattctacagaaataaaaagattataagactactatgagcaatattatggcaaaaaaattggataaccgagatgaagtgaacccattcctagaaacacaaaacctgccaagactaaaccttgaagaaatagaaaatttaaatatacctataactagtaagaagatcaaatcagtagtcaaaaattttacgataaagaaaaaccttggacttgatgggttcactggtgaaattctaccaaacttttaaagaactaataccaattctcaaacttttccaaaatttgagggaacactccctcactcatttaatgagaccagttttaccctgatactaaagccagccaaagacatcatataaaaaataaaaaaccacagctcaatatcccttattaacattgatgcaaatatcctcaacaaaatactagcaaactgaattcagcagcatattaaaacgatcatacactatgaccaggtaggatgtattcctggaatacaagatagtttaatatatgaaaaccactcaatgtaatacaccatattaacagaaagaacggaaaaaactcacctgatcatctcaattaatacagaaaagcatttgaaaatttagcaccctttcatgataaaaacacccaacagactaggaatggaaggacactacctcaacataataaaagccatatatgaaaaactcataaggaacatcatactcaatggtgaaagactgaaattcttttctctaatatcaggaataagacaaggatgcccacttctactcaacacagtatgagaagtttgagccagagccattaggcaagaaaaagaaataaaagtcatccaggttgtaaaataagtaaaattatatgattttacagatgatatgattttatatgtagaaaactctaaggattccacaaaaaaacactgttagaacaaataaattcagtgaagtgccagtatacaagtcaatacacaaaagttagttgcatttttatacaccaacaataaacatctgaaaagaaaactttaaaaattccatttacaatagcatcaaaaaggatacttagaaattaacttaaacaattaagacttgtacaatgaaaactacagaacatttctgaaagaaattaaagaagacataaataattagaaagatgtcctatgttcatcgattggagaaaaatattgttcagatgtcagtactacccaaggtggtctggagatttaatgcaatacctgtcaaactgccaataatttttttttgcagaaatagaaaaatccattccaaaattcatatggaatctcaaggaatccaggatagctaaaacaatcttgaaaaagaagagcaaagtttgaggactcacacttcctgatttcaaaacttactataaatctacagtaatcaaaacagtgtgctattgacgtaaatacagacatagagagttcagaaataaacctcagacatatggtcaaacgagttttgaaaagaatgcctaccattcactgggggagaagacagtctgttcttttgtttttgtttttgtgtttttctttttgagacaggatctctctctgttgcctaggctggagtgcagtggcaaaatcacagctcactgcagcctcaacctcctgggctcgagttattctcccacctcagcctctcgagtagcttggactacaggcatgtgccaacatacccagcttttgtgtctgtgtgtgtgtagagatgggtctcagtatgttgcccaggctggtcttgaactcctgggcttaagtgatcttcctgcctcagcctcccaaattgctgagatttcaggcatgagccaccatgcctggccaaggcagtctgaaaaataaatagtgctgggaaaattggatattcaaatgcaaaagaataaagttgttccattacctaacactgtataaaaaattagttcaaaatggatccatgatctaaatgtaagacccaaaactatagaacctttgggagaaagcataggacaaacacttcataacattggatttggcaatgatttcttggttgtgacacaaaaggcacaggcaacaaaagaaaaaatagacaaattggacttcatgaaagttaaaaacttttgtgtatcaaaagacaatatcaacagagtaaaaaaagcaacccacagaattggagaaaatatttgcaaatcataagtctgataaggtattaatacccagaatatgtacagaactcctgaaactcaacaataaaacaactaaattaaaaaggcatgaatagatacttctccaaagaagatgtacgaatggccaacaaacatatgaaaaggtgttcaatatcactgatcactaggcaaatgcaaatcaaaattacaatgagataccatctgatacctattagctacctattatcaaaaggccagaaaatcacaagtgttgatgaggatatggagaaattggaacccttatgccaactgctggtgggaatgcaaaaatggtatagctgctgtggaaaatagtatggcagtcccttgagaaattaaaaatagaatgaccatatgatctggcaactacacttctaggtatatagtcaaaagaactgaaagcagggtcttaaagagacatttgtacacccatgttcatagcaacatttttcactatagccaaaacaaagaagcaacctaagtgcccatccacagatgaatgggtaagcaaaaatgtggatatgtataatggaatattattcatttttgaatacggaggacattctgtcatatgctacaacatggataaaccagaaagacatcaagccaggcaaataagccagtcagaaaaagacaaatactgtatgagtccacttatatgaggtactcagtcaaaatcctagggacagaaagtaaaatggtggtttccaggagctgggggaaggagaaaacgaagagttattgttcagtgggcatagagtttgagttttgcaaggcagtgtgttttggacatagatggtggtgatggaaaacaatttgaatgtacttaataccactaaactggacactttaaagtggttaagataaattttgtgttgtgtgtattttaccacaataaaaaaagtggaaaaacttttcctccctccttatggtgccttccaaagccagacccagctgggcttctgggcccctgatgctgaatcattcctcttcctatccactaggctctcatggtgaatttccaaagctgggctgctgctactttaggggcttcttgcacccaccatccaactctttatgtggcttctgagtagcgttgccatctatctttgggaaactcccactcttcttttatgtggccagagggtaacagagctatctgtcctctctagtgctccatgttcaatttaaggaactagtgaaaagtgagcttcgttggactcacttgcagtaaattccttgctacaaccctctaagcaggagacaaacgatgggaaacctgactgtggtgggtaccaaatggtgatcacccaaattgttgtcatgaaatctacccccctttccacatctcatcagtggagaactagaagtttctagaaataaagctcataaccatctagtgtttctgggagtttaagcagattgttttaaagattcactggccttatttatgccctcagagtgagtactatctttgcatcctctctgctggcccagactgcaacactccacattcttgcccacctaatcttttctgccataacatgagagctggtttcctaagatgacttggattataaaaattgtgttagaaaataattatttcaatagaagtatgttaagggcttggaagtgtacatactttttttttctgaagaatttcaattataaagggagtttaaaaattacccaataaacatatggtaatagaacttactcatcaccaagcaaatcactgctgattattctgagccaaaataatgacatttttttctttcttaatcactcattgttttaatcaacacagtataatgccagtcaaacaaaatagcttgtccccacctacagcagggtattaaaattcttgctgtaggggaagtgcccagagaagacacctttgtgggagctgtttcctcaagccaagcttaaatcttttacacaggtataagaatgctctaaatgtgactaagtaaccattgccttcgagcagaaagcatgtatggtaactgcctgccattttgatctgaacacaagtggccctgagctgagggaatccatttccctcaggttttgcatgtcagcaaaactaggtagaggaggtgactcttaactggttttgaatgataagttggtggcctagggaagggaaaggaagggaatgagtaggctggtgaccactggtatggaactataatacagcatggcacatcctgggaaccataggtgaggctgcagagttgggtaagaggcagagcatggcagtgaaagctaatacaaagaggacatctcacctcctggtaccttaaggaatttagacttcattccctaagtcagtagttttttgtttttgtcatttgtggatcatttattagataccattactccagaggaccagtgattttaggtaaattaagaagaaatgactcaatataatcttaatataacaagggcatgatgctttttttttttaaaaaaaaataataattgtttcactcactgagatgatgtgttatgcagtctggtcaaggctcaaagatagagaagttgtgccatcatatcctattaatttcttttcttggtcattctaaaattagagatttccaactcacaatacacagtgggaatggcagtcaatatttggctgctcttttgggtgaatctgcatctttggatggcacagagacagaagttagaggattctctcagaagaccacattcagcactttgtcagacatgaagtcaaccagacaccacatttgatagctggagagtcaagtgtttcaccctgagagggagtcatgaatggattcatatccactctttggttgaattctctgtcaagaaaaaaaatcgagagttggcaaagggtcagatggtcaaaatgaagccatttgtacaatatttcactttgattcaaagtttttttttagctctgtgaatatgtttattacacacatgtcttttacagccaggttgctaaagacacacctgagtcagtcttattcttgatccgttatagcttctctggtttccactgtaattacttttggtttctatctttatcctttaaaaaaaatccctaggagaagcccagggctgcaagtgtctttaaagtgttggtgatcaagatatcctgccatttacattaattctcacagctagctgagtccttcattcatcgacacaccagccaggtgatccaccactcagatattcttttgttttgatgtttcaccgtgatacatgtatgtgtaaacctttttaaaaaaaccagacttactttactgaatccttatgagaatattttaatttgtggatttcagtccctattcaatgctgagaaatccttagctgttctctcttcaaatattaataatatttttgcactatttttcctgtttttgaattatcttcctttctacttcctttggtttaaggctgctgtttctgttttctataacctgggcttttacctatgctgtttccgctgtctggaatgtccttcccaccaaacctacccttccccaactcctccaaagttcaacttaaataactccttttctgtgtaatctcttttggtccttagttggatatacccatccctctttcgtgctctgatcatacaagattgtaaactctttgaggccctgatggtggcctccatttctttgtacttctcacaggtcctagtacattacaagacataagaaattcatggcctactggttgcttgattttgatatatgaaaaagtgttagaaattcatcacagagagcaaaaacagaactctggttcaggaagaaagaatggggaacatggggccttctcagataattggatacactgtccatgtacagacatagattatgtgaacaaatggagactgctacctcagtgatgatgacagccgattaacagctgccttagtcagttcaggctgccataatggaataccatatactgggtggcctaaacaacagaaatttatttcttagagttcagctgtctgggaagcccaagatcaaggtgccagcaagtcgagtgtctgctgagggcctgcttcctggtttgcagatggctgtcttttttctgtgccctccctcagtggagagcagagagaggggaagcaagtgcttttttatcagggtctcttcttgtaagcagcttttcttataagggcactaatcccattcatgtgggttctatccttatgatataatcacctcccaaaggccccacctcctaataccaccacattgggagttaggatttcaacatataaattttgggggtgggacacagtctatcagtccataagagcagtaatatttattagatgtctattttgtggtagccactgctaagcactttgtttcattgttaaaattcatactcaaaagagcgctatgagggaggcagtgtgattctcagtttccaactgaggacaccgaggctcagaggcagtgagtgatgtgaccgaggacacacagctcatgaaccgctaagctgagacgggtctgtcttactcccgggtgtgctcagatgaccacaatgttacaaggtctccctaaaggcgatgggcggtatacacaggaccagattgcttagtaaccactgaacatgtagagtgtgttgtttggccagaaccacagctaaaacttgcttttttgtcctgtaaatgctaattttgtggcaactgggtactcttgtggcccagccacctctaaaccaaaatcactcttagacttttggaatcagctttggagaactacttacatcactgaaacttaaaaatggggagtagtaattgtacttacacttgaagtattattcatgcagtcctcagagaatatctgaacattcttttacctctcagataatttacaaatgccttgaatgtcaacatcgaagtgtcaatgacatgaagaatttgcccatgtttatgtttttatattagtggagggagcacgcaatcccccacgaactgtaaagtcctatcatttatggaacaaacccgacaaacctgccaggtttttctggtcataacaattttgttttggcttgatctattttttctggtatttcaaagagttgtgattttcttacagactctgtgatgttaattatacgatagcaaaatgctgtctctttgcaattttgtaaataggtctgagaataaattagggtggtgggagtaaccaccttccaaaatgtggatgccaaggttatgagttttgttttcttgagcattgaggttactgtgggtggaatgagtgactctctcaaaattgggcaggaaaactaagactaccagttcccaaggtagcataatttttggggtaggtcagaggaaatgtgggaaggaatcatgtgggagggtcatgcaaggtgatggtctcctacacggtcccctttagaacactcttgacatgaccacctaagccatagccccctcctgagaggttcccacataaagatcagtggattgaagtgtgtacccctaaaagatatgctgaagtcctaacctccagtacccatgaatgtggtcttacttggaagtaaggtctttgcaggtgtaatcaagttaaaataagatcaccagagtgggccctaatccaatatgactgtgttcttataagaagagagaaatttggacacaggcacatacacagagggcagatggccaagtgaagatagagacagattggagttgtatggccacaaacaaagaatgcctggttctaccagtagctggacgaggcaaggaagtctcctcctacagtggctttggagggagcatgaccctgctaacaccttgattttggacttctagcctccagaaccatgagaagaaatttctgttgttttaagccacccggttggtggtactttgttgcagcagcctttggaacctaatacggtcagtgacactggctattacttagaaatactcgaggagctcttggaaaataccaatgcctgggcctccaccctagatgaacagaaatcaaatttccatggtttcagccttgggctgggcattttttaatgccctcgggtaattctaatgtgtagccaaggctgtgaaccattgatacaggtcattattcttgtaccccagacccacctttcccaggctacacctaatgaggccagtgattggcacgtaacccaaaggtaggtatgacccgcctttacagttcaataactctgcccaacgtgactcaatcagatcttctctattggaaaattagaatgtaaagtatcacacaatattagcagacagttgaggggcagagaaatggagagaaggcagtggggaaaagcccaaaggaggagaagccatgggtgagagcgaggtctggggcagagaagtcagtggtggggaagtgggggaggagctacggagaaaagcagaaatgcaggtgttcagtctgagcctggaagacttcttgggttgctataggattctcaaggtgaccaacagagacccggtgctgctgcggtgtcggcaacagggatgaaggatactccattctctacaaccttgttacactgtgtgatctgtggactggcagcattagcatcacctgggagctcattagaaatgcagaatattaggccccgccttccacttcctgactccagatccccagatgattcatttgctcactaagtttgacaagcacaactgtctaaggcctggctgagtagctccagtgtcatttcctgagcttccttactcctgtttatccttatacaagttgaatcacttgagggaacctgaaggagacgggggtctctgtttcttgcagcctgaatgatcttccctgatggaaggcagaaataattttctgtgtaagagctctgtgaagctggagagattttgaaaatgagtctggatgttagggattgctggacgctacctgtgccattcatcatagttggtatgatttcagtaatacttggtaccaccaaggcaaagctttgcaagtatctctggttcagtggttctcagagtgtggtgtctgcacaagcagcttcagcatctccgggaaacttgttagaaatgcagatactcagaccccactgtagacctgccaaatcagattctctcgaggcccggcaatctgtactgcaacaaacccagcagatgggtctggtgcccactaacatctgaaaaccgctgcccttctctattgtttttacgctattgattctctcgtcttcagaactactgggcaaaggacctgggcatgtcattctaatctattggtaataacactggtggggatgctctatttgtaatgatcccaaactgaaaatgacccgtatgcccacaacagcagaatggataaacaaattgtggtacattcacacactggaagatagcaagggagatgaatgatttacagctgcagacccaatgttgaatgaaagaagccagacacaaacgagttcatgctgtatgatttcatttgtataaaatataaaaacaggcaaaaataacctatgttttgagaagtcaggctttccacatgttgctgcgtctccctgggatatttccccctctccaccctgtcccctcagctcttccctgtctagatttccaatcaccctgccattctcagcttagatgtacttttttctttttttttttttttggagatggagtctctttctgttgcccaggctggaacgcagtggctcggctcactgcaacctccacctcccacgttgaaacgattctcctgcctcagcctccctagtaactgggattataggcacacgccacagtgcccggctattttttttttttttttgtattttcagtagagacagattttcactatgatggccaggctggtcttgaactcctgacctcaagtgatctgcctgcctcagcctcccaaagtgttgggattacaggcatgaaccactgcgcctggccttagatgtgcttcttcagaatctttctctatcaccttgttgagaagtcacacaggagagggtacttcctggaaggagacagatggggggtgtagcgggcatttgtagtgttctgttgcttgctgtgaatgcttatgacagtggtgtgttctttttgtaaaaaacatatcaagctgtaagcttaccatttttgcacttttctgtctgtatgctattatacttccatacaaatttttaaaagtattggtgggtgtcgtaaagtgtttgaatcctgatgtgattttcctacagcattttttttttacagcctataatttgaggttttggtccatctcttgctttcagtgcatgagatgaggaacgttagtgacccgtgtggttgtgtggattaatttctaaaacctcacttggaacagagtgctaacagttgcaaatgattaggagtttatgaagtgctttaaaatacatcttggtagtgttttagggtaaagttttgtcagtgtaatttagtttttaattaatgaatgacttccccagattgttttttaaaaaaataccggtttcaccatttttttcccctagaggaccctcttaaatcatgtttggaatttcataaaagagaaaatgtctgtgtgattatttgttctccataaggtggtaaatacatgggcagagcttttagaggaagtgattttattgagtaaaatgagcctctaggagatgctttgaacttacaacgaagacattcacaaatcattacagctgctttccagaaagcacaaatacttattacatatgcctggcttaacctgaattttagataagtaacacaaaggagaaacaacaacagaaaaacccaacatgatccgcatttattcaaaccccacatggcatggtgcagcccctctgctgttataattgacagggtagtttaggaaagaataatgctcccctctgacagttgcagggcctggtcttattttcattacacagattggggtttaatgggaaaatcccactgcaactctatcctaattagattcctgggttttggggtgaaaggaatattcaaggtccttttgtacaatctgcctatttgacggtaagtgaaatgaagcccacagaggctaaagtgacctcccgaaggctgtatgctgggttagtgaaaaagcttggctgtgaacttggagttctgggctttttccagggacaaggtgaaagtctagcagagagctggtctccgtggagagggtcgggaagtgatgggagcctgaggacctaaagcagctcaagctgttttccaaagcgaggtaggctcacactggaaagcttgagcattccaatctggcctccttcactgtttctcctacagcatattcagactggagtattgtattagtccattttcatgctgctgataaagacatacccgagactaggaagaaaaagaggtttaattggacttatagttccacatggctgtggaggcctcagaatcatggcgggaggtgaaaggcacttttacatgggggcagcaagagaaaaatgaggaagatgcaaaggtggaaacccctgataaaaccgtcagatctcatgagacttattcactaccacgagaacagtatggaggaaactgcccccatgattcaaattatgtctcatcaggtccctcccataacacgtgggaattatgggagtacaattcaagatgagatttgggtgaggacacagagccaaatcatatcgagtagagtttgattaaaatatcattttattattattattattattattatttgagacggagtcttgctctgtcgcccaggctggagtgcagaggcgcgatctcggctcactgcaagctccgcctcccgggttcacgccattctcctgcctcagcctcccgagtagctgggactacaggcgcccaccaccaggcccagctaatttttttttttgtatttttagtagagacggggtttcaccgtgttagccaggatggtctcgatgtcctgacctcgtgatccgcccgcctcggcctcccaaagtgctgagatatcaggtgtgagccactgcgcccagcctaaaatataattttttaaaaagtaaaatataaagacatacctattgcttgcataatgcatatgttctggaaaaatctgtggattttcttctttacatctttctctaccaattcaactcagtgcactaggttttgagagcctgccacttgccaggcacatagctagatgttggggatttggctgtgatcaacactctctctactctcatggtgatgaacaaggacagatactgaatcatcttgaaggggaaatgcatggcgttgagaggtatgtagcagggtactgaagctacagagaaagatccagctaagccaggaatggcaggaggaggtggctttagcaggggacatgctgggctggggacaatgtcccagaaaataaagtatgatgtgcaaagcttgtattccagagacacagtgtcactgtcaaggaggcctctgcatcttcatccctcaagatctgaactgctcaaccctaggtctgtgagccaataattttttgtgtgtctaatctttttcaaaccacactaaacatatttcaggagacaagtatagccaaaacacaattattatgcagtggtttatcagagaaatacaaggaaaattttacaatctgttgctgtcctcaaagaggcttagccccacttttccatgtttctatcagaataggatagaatcactgagtatagattgattaaaataacattttttaaaaagtaaaatataaacactttcctattgcctgcataatgcatatgttccagaacaaatagtagaaaaataaaatatttcctgtgtgagtcaccttttctctagactgtactgttagtgtcttcagcctttctttgaatcagttgttttccagatcattctccacctcaccctctgatcattataatgtggatataactcagaaacggcccccacatttcccctcttcggttgtggggcgggggggaagacacaaacacagaatttaaaatttaaatgtaaatgtaaattaaattaattaattgcttatacaataagcaaataagttaattgcttacttttgtagtggtgggggaagatatgaacacagaattttaaattaaaatttaattaaatttaaaaaattaaaattaaatttaattaaaaaaataattttaatttaaaattctgtgttcatatcttttccccacccctacaaccaaagaggagaagtgtgggggctgtttgtgagttccacaatataatgatcagagggtgagatggagagtgatttggaaaacaactcattcaaggaaagtctgacgacactaacacagtatagtctagagaaaaggtgactcacacaggaaataattttattgtaccagtcagggaattttacttcaaccagcagaaactactgctggctgtcttaaaccaaagtgacattaattgaaagggaatttgggcttgcacaagtaggggttaaaattagagactggggtggaagattgggtagaaagtaagggaagtgtaggcatggtcaggacccaggaaatgcctcctacaaatgccaccaaggtctcccaatatcccctccatgtttgtggtacttgctcaagtcctagacaagtaagcatcctactgtctaagggtacatactggaccctgtctatgcagaaggaggcagaggaggccagcactgggaaacacccttatatcaagactgtacaatataggaatatacaaattgggaatgcagccaacagtggtttgttttcttgcttatttttgtccttgcttgttcattttctctctcttgcctctggggtataacctcttcaacaacaggaacttcatctgttgtctgcctctggatccctaagccctcaagagtagacattcagtaaatagctgtggaatgtattactggaggaacattcaggggacataaacatattccacattgttctatgtgtagacaaaggtgagtgtgccatttttatagggttgtggactttggttcaagataaggaagatttttctaacagagttatctagcaacatcatgctccatttcatgaataactggcctctgagtgtgaaggaagcagcaatgagatttcaacatggacatccactaccgcttcctgtgacaacagcacttacaaacttttgtttggggcttcccttccccactctcaggccatgtgttttctggaaagttcactccactttcaaatccagagggtaatttgactggtaaatgctatcaccccggccacagtgactggttcactttcccccacctctacaaccaaagagtgacccaaatcaggtcaagcagggcagccaaccagatccaacccaggacttttgtttgagccatggagaaaacagactgtcttttgagggatttggtgtcataagagtggggtccaggagtagccaggaaccctcaagtgaaacttgagaatgaagctgacatggaagatgtcagtgaaggagggcaagcctggtctgtgtgtgcctgaagccagatccactcagaattcttataacatgagccaaattttttccttggattgggttttctgttagagcaacaaaatgagtcttaaataatatgagtgttaattccagttaattgctagtgactatccccagcactgtgttgaggaggattccgaaggccatatccagatacgcggggaagagtaaggttgataagtgttgtctgccacagaagcggagggggagttgtgccctacatgatgtgtttgttacccttgggcgagatgttcaaactcctgtcataaaggttgggtcaggtggtctgcaacagtgctgttcaatggacatataaagtgggtcacacatgcactttacactttttagtagctatatttaaaaagtaaaaacaagatagtaaaattaactttaataatatcctttatttaattcaatatgccccaaatattattatttcaacatgtggcactagctgcatttcaggtgctcaatagctacatgtggctggtggctactgtcctggagagcacaggcctagaaccatagagtactggaactagaagagaccttagaagcagcttctaccacctgcccattgtacagatgggtcaatggagcctgagagaggagggagtaactttccaaagcacatgagtaattgtagtgactttctgtggcatatttcactttcctctaaagactgagactgtatagtgggtgtagtagacagaataacgaccctcctcccaaagatgtctacatcctaatccctggagcctgtgaatgttaaccacgcaaaagtgtggttacaaaaaagacctgctggtgtgattaaattaaggattttgatatgggaatattatcctgcataatccaggtggacccactgtaatcacaagggtccttataagagggagggggtcaaaagtcagaaggaggtagatgatggaacccaagattggagtgatgcaatttgaagatggggaaagaggccatgggctaaggagtgcaggaaacctctggaatctagaaaaggtaaggaaacaaatccttccctgaagattccagaaggaatacaaccctgaagacaacttaattttagccttgcaagaatcattttgcatttctgacctccagaaccctaagagagtaaatgcatgttgttttaagttggtaagtgtctggtaatttattacagaagcaataggaaactaatacaatgagaaatggctctgctgagtgagctgccaaaatttctttccttgattgctttagacataaaccagtgtttcctgcaataagaccacttaccttcactctgagaaattcactgatatatgtggccagtggctgtataccaccccaatttccctggaaaattctttaaaacagtccttagcatcccaccaaagcttttaccagtaaaaggtgacaaggtgaatcttttcactctaagtctacctttgagggaacatgtccccaatcctttggtgggttccaagtctggcctggggaagggctccacaaacccaccagcaagttattttctttggcttcttctaggaagtgctatggaggctacaaagctaatgctactctctggcattcaggaataccatggtgacacacacacacaaatgactaaaaacaccatagtttacatcatcctttcctttcattaaatgtcagaacacagctagagaactttaaacgtgacatttttgtcatcctgtttgcccatttggaaaatgcagtttaataaaggcagctgggttagttcgaagagcacggggcagagtcaaaggacttaggctcaaccaagaattagctcatgatttctccgcatctgtgtttctttgtcatcaaaaagaaacactgagtttggtattccttgtggttctccaattttattattttaattgtgtataggaagtggattgctggtttgagaaacagcatgataatacataatacttgggatgtgcttcaaaacctattttgaattgttatggagaatgggctgagaataaagaaaaaatataaaaataaaaaagtctactttccttttagacaatttttttcattgtgcttgacttcagtgttattttgagtttcacagaatcacacaagattgaagtgatcattaagattttctgcccagtcctttgttttgtagtgaagaatgctgaggctcagggagcttgtgacttgcctacagtttcagaactggtattgagctagcagggctagaatcaaggtctcctgattcacaagctagaactcctcttcctccctcatcagctctcttaatttatcctatttataagtttatagtttttcctaagaatagttgagaggagcatccctccagtccttgccagtgcaatggtgaggaaggagggaaaatggtggtgctgcatgcattgttgagatggctgggtctcttgtgaggcttgggggtctgtacataaataacttaggttagagatgtggccaatcactgctacattggtcactgatagtgactaaattgccctctgaaggggactgctctcattaattgcaaagcttatatttcacagagttggggctgaaactaggaagtgggtgagttgtgccatgaataggttctccttttctggctcttacccctacacaatgctcagtttctccttttagaaactgacaaataaagaaaaactcacagacttcctctatggcttgttctagctctgaaatacccaatgtacacttaatcaggagaggcgcagagtgctgtgtcaacccagttgtatcgctagcaatcatatgtaacaataggcattgatttgcaccatcacactcaggtggaaggtgattacattttaccttctgcaccttacacaaagatcaatttcaggtaaattgttgatctaaatgtggaagattaaagcaataaaatttgtaggagaaaatgtagaagaatgtctttatatccttggggttacaaaagctttcttaaagaggatactaattgaaaatttggactgcgttaaaattcagaatttctgtttaccaaaagactatttagagagtgaaaagttgagcctcatagtggaaaataatatttgcaatattcatgtctgtcaaataactcatagccaggatagagaaggaacttctgcaaattgataagaaaacactgggcacccaaacagaaaatcgggcaaagaattgaatgagcacttcgcaacatgtccaaaatgctcgaaatgtactggtagaggtttcagaagcatagtcatggactgacatcaatgtgaatacattatcaatggactgccaaatgtttttttgattgtgagtgaaggggaatgtatcagaagacacaaagtttggcttcagataaagagcaaatatttatctactcatgtgtgtagttatttcttacaagatagcttggcagagagaggtgagttctttagaggatggcaagtgatgttttaatcaaaggacagacaaggcagtggtgccctggatggattaaagaacagatagggaggccgggtgtggtggctcatgcttgtaatcccagcactttgggaggctgaggcggacagatcgcgaggtcaggagattgagaccatcctggctaacacagtgaaaacctgactctactaaaaatacaaaaaaattagccgggtgtggtggtgggtgcctgtagtcccatctactcaggaggctgaggcaggagaatggcatgaacctgggaggcggagcttgcagtgagccaagatcgtaccactgcactccagcctgggcgacacagagagactccatctcaaaaaaaaaaagaaaagaacagatagatattggttataaaagtataacacttttatttaactatccatattttcaatatgccagaaattgtattgtttttcaaccatttaaacttaggatgaaaatattgagatgtctgtcaacttaacaatatttgggtgggtttgtgtcttagtctatttgggctgctataacagaagagtttagactaggtaacttataaacaacagaaatttatttcttagaattctagaggctgggaagtccaagttccaggcaccagctctagagagggcttactctttgcttcatagatggtgccttcttgtggtgttctcatatggtggaaggggcaacaagctcttaggccttttttgtgagagcactaatcctattaatgagggctccaccgtcatgacttaatcacctctccaaaggccccacttcttaataccatgacattgggaattaagtttcaacatatgaattttggggggcgcacacattctgatcataccaggaagagacagagattttcaaaattctttggtgagcttacaataaaaaagttgaagaccatcggcccaaaaatgttctaaaatgtagggatgatggcagtaaaagaggcctggttgaccgccatgcccccagggcttccagactctcagaatttatgaaaggttcatgtaggacctagcccatggtaagagtatcacagttgcttcttgactgatggattaattcaccttcctcactcaccaacacattttattgtaactttcagcatttatgaaattggttgaaaactcagctgttctcattttctgactaattaatctctagtaagcaattgtcctttataaatctacctactttttaaagtggaaagtaatcacaaacaagaaggttaaatgttaggaggtatatagtaaaacagaaaatggaataataaattgattatttaaagtcattctttgagaaagtagatgagagagtcacttacattttacaatcttaattttccttttaaatgacaaatttcccattgtctagcctaagcaaagaatggagcatttggattaaagttactaagtaattattgttatacaatatattagttttcaaaatacaccaaagtcaccttgatattgttacataattatttttccattggcaaattagaagtcacttcaggattctgtacaacttggaatctttcttttttttttttttttttgagacggagtttcactctgttgcccaggctggagtgcagtggcgcgatctcggctcactgcacgctcctcctcccgggttctggccattctcctgcctcagcctcccaagtagctgggactacaggcgcccaccactacgtccggctaattttttgaatttttggtagagatggggtttcaccctgttagtcaggatggtctcgatctcctgacctcgtgatccgcccgccttggcctcccaaagagctgggattacaggtgtgagccaccgcacccagccggaatctttcttatgaatgcaaattaccactgccttagagatgtgtaaaagtgttcctctagataaacagaatggcagaaaaattagtttttattgtgttcagaatgcagactggaaaaggctggcagatgcaacaaaagacatataaaccattacatgaagtatttatgccaaaatcaaggagcatttaataaggttctgaattttaatgaataaaatgagcttctctcgggcttttacagttccagttttaatgtcctcaagtagttctcttgataatgagtagttttgcatatttataggaaactaaaaagtagagaataaataaaatagcttaatttcttgtgatcaaagaatcaggacattttagagttggaagaaactttagacgttattgataaatagagaatgacaggcatagttattcctccaaaatataacattcataattgacccgttagcaatttggtggatataaatcagtgagatacctgctctacatttaagtgcacattataactatttactgcagatgaatgcttggaaattgatgacacaggcaattctcattttactagcatagcaggttgggttccaaaatgtgcaggttgtgtatctgggatttagagtttattttgtcatggaatcaatgttgcaagtggaggttgaactgccaggccaatacatgaaacccatatgctcatcatgccctgatggtattaaagccccaacccgacttctcacttaaccacggttcaggcttcagtgttgcctctgcatggtgttggagtcactgagaccgggattcaaatcccagctccgccacacaccagctgtgtgttttgggcaaacggacctacctttctttgcctcactttgctctactgtgaaatgggaataatcacactctcccaaggtcaccagactccaaagtgttccccagtgatcacccatcctggtattcatgctttcatgtggtcccctctcacacagaatacagctgacctgtgtaagcagtaggatgttatggaaatgacagaatgtgacttctgaggctaggtcataaaacatatggtgacttgctctctcttgactcttgctgtgggggaagccagctgccatgttgtgagggcactcaagtagccccacactcaaacagcccacatggcagggaaatgagatctcctgctaacagtgctaccttgccaggcatacagagaagatccatgaaccctagtaaagccttttgatgacagtatccttggctgttatcttaactagaaccttacgagagcctctgagtctgagccaccaccagccaagccattctcacattcttgacctccagaaattgtgtgttggacaataaatgtttattgttttaagctgctaactattggggtagcgtgttatgtagcaatagataactaatacataatttaatggattaaatgatatacggaatgtagaagtcttaatctactgtctgggcagagaaagcatacataaatggtgactgttgatacgattatcccattgttatcccttgaatacctagtgggatgatagatttctttattaggaataaatcaatcctattggtagtcagtcatgacagcacagagcatatggaggatggcaggagacatttccttattcttcccattgggtttccctctgaactcacagaattatgagcctcatatggcacccatagtcccttttgactctggtctccctacctcttctctttcctaaccctcttcccccagggtcctagctccatccagggggtatctggtgtcagggaggtggagatggtgaggtagttcttgattctatgcttgattctccactggagggtacataaatttggtgctttattatgctaaagatttgttcccatcagaggcagacttcggtctgaaggaaggtgctttgcaacctcaagctgtgatagtattataatactattattattataataatatttagctttccatggtcattctatgtagcgtttctaccacacccaatgaacaatcctcttgttttcatagttccttttttcagcagaaggtgaggggaaagttgatttcctgataccatctgcaattatttgtcaaggcagacttcagtaaccttgaactggacactcttgtgagctcagtgacgtgtcatttcagatgctttctggtgctcctgtgaaatattgactctcagccagcacctgagactaccaagagaagcagaaatcaaacacaaaattattaagaatttgtgttcatgcaggcatattaaattagagtcaactagcaattttggtaaatgctccagttgttataaggcttaatgagagaattcagggaatagaaagaattctcgagagcccttttttcctttagtttttttttttctattgttgagagtgcttgttaattcacagaaacactaggctgagaatttcacatgagaaaaaaactgagaaatggaaataataaagctgtgactaggaaattattgtcaagaattacaagataactgaaataataactaatatttgcctgtatatcagtgttatatcaatcctcacttataatcctgtgaagggcattctttgatctctatcttgcagataagaaaactgagcacagtagttaaaaaatttgccaaaggagaaggttagaagcaaaaccgagcccctggtgtcttttccacaataccatgaagcttcccttagattatgagttttggtttataaaaacatagaggctgttcacagatttttttaaaagcaattgtctggctgggtgagacgtggttcacgcctgcagagtcaggaggattgcttgagcccaggggttttagaccagcctgggcaatatagtgagaccccagcttaaaaaaaaaaaaaagcaattgcctgagtatttttttttttaattgtggtaaaaaacacacgagacttactctcttaacaaatttaagtgtccgacttgatgttgtaatactcgatcttcccacagtgttgtcaactgaaggatgacaaggttcataaatttggaaaggtgagctttattttgcataaagcgctgcagcctgcagagtggccattctgtcaggctgagaatcgtagcctccagccagaagccagaaacaagcatttcaagggagagacaaagggaataggaatttatgctgagtgatgtgcctgaatatacatatttaataagctttaggagtcatgaatatttatgaagaaacgtgcacatgcgcaattgagcttcatgcatcttcatgggtcccctgttcaaaaaatggtggcattagcatgatccaagggtgcagttttcaggcttttgacatcaaaaggtgaagcagaggatatgaaaaccctcactgcacattctccacagactggctagaaccaccctgtggtcaggggtttcttatcaggaaggaatgctggttggttgttgtattgtaacctcaaaggggaggggaagcatcaggtagttggttgatattagaggtggagcgagtctttgcaaagggctggtttctgtttagcccttaggaaagaaagactaatggtggttagtaaaggtgagaatataatgagatgtgtctgacctcccatcccatcatggccaggaactcagttttcaaggtttctcttgggtccccttggccaagagggggttgtttcagtctgctggggggctcaggattttatttttatttctagtgtgaaatgtatgacaaagcttgggggcactgagcggccatcaacatgaaacaaacaggctgtctgccacagacttcctcattcttaagattcctcaccgaggaagcaataccttagtgctttgccgtgctaaaaaatattttaaaattgttcagtgaaatttgtgagagctcactcttttggactgagctcctgcacaaggctccaacagaatagattaaaccaaaatgtagtcactcatgctaaagttctataccgccaaaccaaaagtcacttgtttatctgaccttttaagaaatcaggagagagagagagagagaatagagagatcataaacaaaggtatttcttccaaaatacctttgggagaaacttaatttatagtttaactttgaaacaaagatgataacagccctttaccaaaagaaatctcatttttgtctggggactagactgcctttgcagagctaacaaattggtcacaagattcaaaattaaggtttgagagtcactgttgtaaaacttgagatcagtgcttgagatagtttacagaccctgcattctgatgcaccagctgatgccacccagaccaataaactgacttatcttgtcttgtagcccccactcaggaaatgactcagtgcaagaggacagcttcagctgtctctgatttcatcttcaagctgaccaatcaacactccccactttcccacccactacccaccaaattatccttaaaaactctgatccttgaatttttggggagatgagtcgagtaataacttctcccatgtggcatggccagccttgggtcaatgaaactctttcttcactgcaatgccgtggtctttatttgtgcagcaggcaggaagaacgtgttggacagttgcaaactgactgttcttccatgcccaatagagtgccctttctaaatatttagatgagatgctgcctagttcatgaatccctaataatagccaatttgatctttacactaaatctgtgaaaactttttttcttatcaaagcaaaacaacagagagtaaaaaaattgtttctaaacattgttagctaattttcagaccttactttcaggagctattaaataaataactaaatagtataagggaggaaaaatagttattccctttatttgtaacaaaagaaaaacaaacagaatggaataacacgttcccatgggagatacccagggaaacattagcaaatctttaaagtagaacctagagaggtggctttgacttccagccttaaatactatcatttgctgaaataaagaaagaagggtgtggggaaagccctgttaagatgaggtgaccaggaaaagttcagtaaacatgaacaaggcttgttatgtggcgttaagctcatgccttctccactgatgagagctcctagggaattagaatcattcctctcttcttggttcagagagggagacaccattataaatggagatttcctttatacatgtaaatatctctaacaaaagggtgacacttctgttcttgttttcatagtagttctgtagtttctcaaaataatccactcaaaataatcctcatgcagaagaggaatatttggggtggcatattctggtctcctacagtcatatttgggggccacatgtcctgaattccagcaatagcttagacaaaaaacctcaaccctaactttactgtctttccctgtttcttcactcttcacctcaatccctccctcagtaccattaattctagtttcctagtttttctcaaatcctttatctcctttccactcttcctgtctgccttagtttaacctcatgctgtttattcaagaatgcaacaaaacaaaacaaaaaatattcacataattacctggggaacattttgagaaattattgctataaaataatttcatataaaaagaaccactgtgaaaaaagcaaccagagaataagaaaaagggtttttttaaattaaaaatacagttgctaaaatttttttaaaaatggatgagaaataaacttcaccaataaaccagaaaaaaggaagaaaatatgagagaaagcttaaggatatgggtgctaaatatgggagctctatattcttttttttttttttgagatggagtctcattttgtcacccaggctggagtgcagtggcaccatctcggctcactgcaacctccacctgctgggttcaagcaattctcctgtatcagcctcctgagtagctgggactacaggcacgtgccaccatgcccggctaattttttttttttggtagagatggagtttcaccatgctggccaggctggtctcaaactcctgacctcatgatctgcccacctcggcctcccaaagtgctgggattacaggtgtgagccaccacgcccagcccctctatattctttaagtaggatttttaggaggacaagcagcaagaaggaaagaaagacaaaaggaggagaaaaaaagagcccacaacctgaggaaatgagaaatggaaatatcaggaaaaagaaacaagcctagacatatgctagtgaaacagtagcgctatccccatcaaaggtaatgataagacaaggacctcactgtccacagatgctgctcatcaatatgctgatgtaattgcctgatggggtgttcctgcccactgcacagaaaaaaccaattcactgagactgtagaattgcagtaaagaaacagtttaattaatgtgaggacagccatgtagaagaactggagttatcactcaaatcagtctccccaaaatctccgagttagggtttttcaaggatagtttggtgggtggggaaatagggaatgggtgctgctgattggctaggaattcaatgataggggtgtggaaaacagtccttgtgcactgagcccacttctgggtggtggtggggtggccacaagaccagttgaatcatgagttatgtgaatccaggtggggttgccagaatgcaaaaatctgaaaaacatctcaaaagaccaattgtaggtctacagcagtgatgttatctataggaacaactgaggaagtcacaaatcttgtgacctctggctacataacttctgagcagttagggattatagaaattatacctacattttagcagaattcaggccctttccataatcataatcttatggcctttcattagtcttacaaaggctgttttaggtccttgagcaagaagggggttagttctagggaggggctattattaccatccttgctttcaagttaaagtatcagctaaattcctcccacagttaacttggcctacacccagtaatgagtgaaaacagccagcttgtgaggttagaggcaagatggggttagccatgctagacttcttgcattgccataatctttgcaaaggtggtttcactgggcagtctagctagtgaaataaaatgaggaatgttaaagaaaaaagtattctgacacttgttaaaatgttaagaaatgcttcatttaagactattccaatcagggagagagatgctcaactccacatacagcaaagacagcgggggatttatagctgatgagcactgagaaggagtcagtagatgggaaattactaagaggagacaccaagggtggggggattcttgctgaaccaacttaacaagattcttgccaaagacaggccagaataatcaattatcaagggtgagggattttctctaaactgaattagcaggattcttgctaaaaatgggctaggcaggctgaagacaggagaggtgtcaatgtgggggcttagttgagaagggagctcagaggagcctgggtagagtttggtgagcagagagctttattcaggaaccaaagagctgaaactgtcactgtctgcagataacatgatggtctaccaataacttcaacaacagcaacagtaatggttagaacttttgagaaagtttattatatttgtcaaatataaactaaaaattgaaaaaatgattttcccatacatcatagcaattatagcaattaattttttacaaatctcaattgccagatgtacaaaaatctgtaaactacttgaaaataaatgtgaacaaaatattccagttctaactaaatgcaattattaaaatttactaatggagaatcatgtttacgcttgggggagcagtgactaaaaaggagagtgaaggagtctgtttggggctggcaatcctttgtgtctcgatcaattaaaagtttatacaattttcagatgaacatagaaaggacatttaaagttggagaatattagcatatttgttggtgagaaaaccctgttttgtaaaattgtcccttttcctaaatttaatattaaattcaatgctatactaatacacattccaaggttctttatgaaacttcacaagtttccctggtgggaggtaattgaatcatgggagcaagtctttcccatgttgttctcgtgatagtgaataagtctcatgagatctgatggttttatacagaggagttcccctgtataagttctctcttctcttgtctgccgccatgtgagacatgactttcaccttccaccatgattgtgaggcctgcccagccacatggaaatgaaagtccattaaacttttttcctgtataaattacccagtctcaggtatatctttatcagcagcatagaaacagactaatgcatcctgtaaagacacaataattaaaatgttatagtattggattaagaatatacagattgaatagtagaataggttagaattcagaaatagaccaaattatatatagaaatctagtaactgataaagttaataattcaaatcaatggaaaaatgatgggccatttaaccaatggtattagataatttaccattcctgtgagggaaagaaagtcagtttctaccatatctcatgcacaaaattaaattaaggaataattagagatctagatgatttctaatagtaccagatgaaaatacaggagaataattttataatctttgtctgagggaggacctcctaaataagactgaaatcctaaagccataaaggaaattgttaacataaatgactttataaaaatgaaggacttctgcatagggaaagacatggaaaacaaaattaagatactggagtgagacttgaaagttatagcattgtataacctccatcacctccaccccattctcactctcactcagctcatgaccttgtttcctactgcaatgagaaaatgaaagcagtcagagataatccaaagatttccacaagcagtgcccccaccctcccaccaccctcgtaatctcacttccctcctgtcactgcagataagctggccagctcctccaaattcttcacttgtaagctagacctcatctttttttttcctttgtttggggctcaaaaaaacgacaccccaaagtatggtgcctgggcatgctgagtactttgaactaaaggacattggaagacatcagaagcagcctcagaaccagagtctctctgaccttctcttgccctcctgcctcctgcccctcattcttcctggaagcaagccatagaaatcagaattctttttcctcaaggcatatcataaaaactagaacgcattttccccaaagtcagccacagcaactagaattatcactctaactgtcccccacctttctgtgtaagagctggccataaagaaattctctgacctacccttgtctgatagtaggtcataagaccctcattcgaggtggggtcctgccccataccctggaagaagaaatgctgcaaggagcgccaagaagaatctgaatagacaggctttgctggttttccccacatcaatctaccattagatcataccttttttgtccaatcataaaaatggagtttttccttgagtctttgggtcttcattctgaaggcccccgtatcatgtaacattttgatttaaaaagtctgtttttctttcttcttgttaacctgtcttttgttataaaagtgtcagctgtgatctttataatggggagaaaagatattgcaccccttctactcctacacctccctcggtgacatggctacatttgccatctccaggtagaactctctcttgagtctgatacacccagctgccctgctgggcctctctgcttggatgttttatgggcatctcaaggtcagtatgtccaaaactgaactcttgatcttccccccaaaacttactttatccataaacttttccttctcagttgatggcaatttcaaccttccacttcctcagattcctgaaaactggagtctactgtcttcctttcacattccacttcctattgtaagagcacccttttgggcccccatttaaagtctctatccagggccaggggtagtggctcacacctataatctcagcactttgggaggctgaggctgtaggatcacttgaggccaggtgtctgagagcagcctgagcaacatagcgagaccctcatctctacaaaaaataaaaaattagctaggtgtggtggtgcatgcctgtagtcccagctacttgggaagctgaggcgggaggattgcttgaacccaggaggttgaggctacagtgagccatgattgtgccactgcactctagcctgggtgacagagtaagaccttatcttaaaaatacacacacacacacacacacacacacacacaatctatccagaatttgttcacttgccctcacctccacagctagctccctggtctgaaccacgaccacctctcacttgaattttgatattagcttcagagcttgtctccttgtttctatcctgtgcttttaacacagcatccaaagtgatcctgcaaaacataaatgtagttttttcaaagtctttcaaactctctcctggtcactcagagtaaaagccaaagtccttacagtgggctctgacctccctgaccgctcagccctgctggctctgctcctggctgcactgagcccctgctgcttgttgttcatgctgggcacactgcacctgagcgtttgtactggtggctcgtgctcttgaacacctttacctcaggtggccctggattaacttcctcacctccctcaaatctttgctcaaatgtcactttttaaataaggcctgtcctgatcatcccatttaaaattgcaatcccactccctaaatggcacacctgatcctccctaatctattttaaaaacatttatgaccttccgaaataccgtatcattcaaaccaccaggaagctgacatgatctcaactttcccagggtggtaattgttcaaccccatggctttccaagacaagtgcctttccctcaacatagagccagacttttgtctcaacattctgagtcttttatcagttgagtgaaacttgcagaggaaaaatacaaaatgaatgactggacacattgatgatgagctgtggtccctgctattgctgtggggggaggtggaatatgtgtgcattggggttgagggtgccttggttcaaattccgggctcactctttgttaagtatatgaaattttgcaaattgcttcagataatgagagcctgggatcctgtagtacagaagtgaggaaatgaggtggagaattagctgttgagagcagctgggtctgaggttattcacaggttattcatccactctttggacaaaagttaccaagaaccaatcatattggagagattcaccacatggttgagagtcataagtgcctggaaggaaatgcaacttaggtcctaaggacagtgtgaaatggagacaaggagacaccagccttcaaagcttctgctcgccttgcaggatggtaaatggatggaaccctgtactttgagccctaaagagagacttgtggagttgagccctcaagggagattttgggagagcaggcaggcccctgtcgaggcccgcagaaccctggccacccctgcagggagagcatgtcatgtggggattcaggtgtcaggtcagcatgtagcctgttcttaccgcagccagcctctacctgggtcacccctgtccagggatgctctactgttgagagaaagtggtcttcaccagccagctttgtctggggtaaaaacaagcaaagccaggcagggattctgagaaggcaggaggttctgattagcacaattatccaaaagtttaaggaacaaatatccactcggaactcattattttattgtactgggtggcaatttccacagatttcaaactcaaatgcaggcttgttggatttaactctcactgtcaataaaagccatgaaaggcatatgcaatcagcccttaatatttaaaatgtttccccattaaaaaaattgagatactttatatatagtagaatttacctttttcatgtggagctatctgagggcaaccatcaccacagtcaatatatagaataattccagaacccccttgaaattccctagtgctgctcctctgtaggcagggccagctccataatttttgaggtcttgtgtaaaatgcaggaaaaaaaaaaaggccattaaagttactaaagtacaacgcttttttatttcatcttgagtcttttttttttttttttgacttgggctggggtttttaaaatttgctatttaatgttctaagtgaagaaaaattaaaattttacactagcataaactttatgtaatgtcagctttatgtgcaaatataagaacattcaactggtatgtgaaaccatggaaacaatttatattttgtagcttgtacatgcacccgtgtttcattcttactagaatgatggaaagcagcacataactaactcaattgtttttatttcacttcttgatgaacacactttctaccaaccacctatggagccagacggttgcagaacatgctttgctttgagtctctgtgtgattctatgtcctgtatccagcatcttcctgttgttccccctgggggccgctcctgactaattccttatcagctttctggtgatctagcgcatctttgactccccttccatcttgccgactggctccctgtcctgcttgtatttcggtggacgccattctcattctcttattctcattgtgttggcagcttcactttggccaagccaacgctgtattctctggttcctgggttgaacctgatttctccacagaacgatctgcaaacaacgagcaagctgatgaccaaaggaggcctccttcactgtagggatcccttctcatttctcacagggatcccttctggcagcagtgtgaggggacaggtgtttctcattcctcctccctgcagagctcctccccagaataccatgctcagagggtgagagtgaagcagagtgagagcctggagtccagaatctgaatgggttccgattccagggtaccattttcagctatgtgaccgtaaacaagctccatgcctcagttttcccatcagtagaaggggaaaaataatagcatcaagtggaacttgttttaattcttttgaaagatagcatacataagtacatgtaagtgtagagtagacaaattttcacaaacggaacacatccatgcatcagaccaagaaacagtcccacctcccacccccatagatcagggttgctttgaggataaatgagctaacatttataaaatccttaaaacagtgcctggcatacagcaatcattttatcacaatctgttttttaaaaaacaagttaattaggagggaactgttggcttcatgaagctcagccgcttacttcattttagtgaaagcttggctgtcgcacaagtttagggccccctctcttcatatggtgcagccggcaggatgagttaagagtcttcaaaaataatcaattattttcttatcccaaaggaccaggtggtgcattatacagcaaatggttcccgtggaatgcaacaattttgcttagatgggaaaagcaatatgcaatcaggctgctgtcaccacttaataaagggccagatgctgtcgtgcatggcagccagggtggcccatggggagccagcacagcctggaccctggttaacagggccagaaatcagaggtctaggggcagggggaaggggacttctggatgtggctttgttcattgcctgattatcccatgagatgcacaaggaaaactggcccgagaaaagtttctatagaaatggccagaatgaactgaagcagggttggaagaattagtgcattcacaactaatttcacacaatcctctaaaacttatgaacagaggaaatggttatactatttatggtgccttactgcacttttattttaactcagaatacatctgtgccccttctcttgccttttatgacacaaagaccaaagggggaaaaaaaacaaaagaaataaggaaaaaaagacaataacaccagatcacaaaattaaatcaaagaatttagaaggagaaaaataatggttgccagtatattttctggaacacattaaattatggaaaaataataagtattctgttccactatcgcttggagttgtctccactatagggatggaaaactaaagacaagtgagaagatagaagagggggaagacatttcctgagggagtggactaaggacaggaggcagcttctgaggttattggtgcattacattgttctagaacgaatccacacccatattttggaggtagaagtcttacatggttttggcattaaggaaaacatccaagcaacaatttcagaaaatttgtagcattctctgcattgcaaagagacttttaaaatttttagaatgtttctctaaacaagggcagatgtgatttttttaaagtcattaaataattacgcttgcagagctataggcccacagtccatcaagacaatttttctgaggcttagagttctctttagacacatctcagaggccagaattgcttccagggtgcagagtgtcactaccacagctggataagacctgtgcttgtgtctattggcagaactcggagtagaggaaagcacaaatggggaaccagctgggaatgtcatggctgctcctgcaatttcttctgtccatccacaaaaaaggtgaacatggtcccctttacctcacttcagggtttaaaaaattatttttaattatgataggtacataagagttgtacatatttatggggattattttttaaatcaagaagaaatgtatggtgcccacgaggagcgtgtgtgtgtgtgtatgtgtgagtgtttatgggagagaagaagatagagtgcttcattaaatccctgagcatgtctaaattttaatatcttaggcctacaggttcaacagaaaaaaatccgtcaataacgttcaaaaataattcatgaaaatcaggacagtccacattatactgtacataaggcattctagtttcagaccttgtgcaaatgaacagtggctgctgtgcaggagggaagtctatgtcatatagctggtgaagctgaagtccttattggctgaattaagacaatacccagatggcttctgctgtagctacattctaagtttctaagttagcaaaattgtaaaaccactaggctattgaacttgcaaaattccacaataatattatgaactctaaatgagtccactagtttttccagatttctgatatgatgtattcagtttgggttagagtgctttttcctcttaggcattaggcctctaaaaggtaagtcagtgaaagtatcgtgcataaggatttgtaaggatatgaggacagtgggtggattcaacacaaatggtgatttggccaacatgggtttcaaagtctgactaaattcatataatcagtctgtgttctctcctaacagagtgaatatggcattttgctgatgaggcacaatgacaagctcaaacacacctgagccgtcttctagggagagctgttcagccacacacggggccccgccagtggtagattaaagagggcaggaaactcttcgacactcctcctattgagaggtggctgctaattcccctccccttgattttatgctggacttaatgtcaaaaagaatgcagcgaagttagggttaggactcctgaaatgaggtaagaggaaagctttcagcttctgcccaggcttctcgacatattcactcttaaacccagttgtccatattgtgaggaagttcaagaagacctgtggagaaactcatgtggaaaggaactaaagccccagatgccaactctggcttttctcctagctgacagcaccaagttgccagccataagagtgacccatccttgaaagtggatactcaaccccagttgcttcagttgacaccacattgagcagagatgaactgtaccctccaagccctgtcaaaatggcagatttatgagcaaaatgacttttgttgttttaactactgagatgttttgttgctggttttgtttttgttgttgttttacatagcagtagatgactagaacagcatccaagttctggtccacaatatattggaacttaattgccatgttttgtgtttgggggcaagtgagtacctgtgatttagcctttatctccgtgggactcatctgcttcttagttctgctccacagaaagcaggttcaccttgttaagcagctaggacatgttgaaagagtgggttcaccattatctccatcttttgtatcaggcggtagatgttggcattgctgtccatagtggccaagctcctaccatggtgctgcttctgtggcacactcaggtttcctggagagtactcaggtattgagcagatcctttctggagtgggaggggatttcttctctgaaaaggccattgctgaagggctctacctctgctcttgccagcttgcctccattttcttggcagggtgagctactcatccaaatcttcatgcctgccagcagcccttcagaatcagatatctgtttccacactgaataaaggggctgggcagaccctcattgttgtatgcttttgtttgttggagtcctggaggaaactgaatacatagtctagaaggtgcatcttggaagctttggacatcactgaatttttcagggcaatatctgtaccctatatgtctaccttcccaagattctcttttaggattgcatcatcatcaatgaatttagttgtgacttattctttcccatctggacttgagttctatactctgcagagtggaaccttataaatatgggccatgtgtgcatgcaaacgtagctttgggagtggaatcctcccatgcagggctctgattggggtggcctggggagttgctgggggtggaaggtgctacatttatgtccccccccccacccattttctggtgtcatccaccgtacttttacataatgtgatgggactccagcagaacgtcacaggaactcctgatacagtgagaccaaaactactctgcctctccctcagtggaggaggctaacacaatatatatattttatagggacagggtctcaacgtgttgcctaggctgatctcagactcatgggctcagcaatccttccacctggacctcccaaagtgctgggattacaggcatgagccacgacacctggcagccaatatatttaaaattaaaaacacatacaccttcatcctagagattccacttctagaatattttttacttgttatttaccacatttttagtagaaaaatatctgaaacatcatgaatacatattaacaacccattgatttaatatatggtcattctttccaggcagtgtcaagttgcctttaaacatatgtagtagaactagatcagttgatatgacaaatctaaatgcttagaaggtgcctgaaacatattatgtgtacaataactaatggctttagttgtcataagaaagaaaaataaaaacacaggtatatggctatatattacatatatatctacatgtatgtctatataaatgaatatatatcatttatagctgtaaaacaacataaaaatcctttttatatgtgaatacatacatatgtatgattaggtgaacacagagaacattgtggatggataccataccagcttgtgaatgatgagatacctggaagggtgaaaaagagggaactggaggtagggggagaaagacaaaacagataaaagtgtccaaaataaaacatctttgaaagtttatatatgtaaatatacagagaaagaaagagaaatgaaaagctggttatcaaactataaatggtaatgagggtctcagagttttttcctaaattctttctttttcttttctctactttttgaattttcagaaacactgaacgtgtgttattcatatagctggaaaataaacgctattttcgattttgaaaaaacaatatgaatagtaaagctatctctctgatcctttaacgattaagaaaggctgatgatgatgatgatggtgatagtaatgagtggctaacattatttgcacacttaccgtgtgtctgacactgttggggttttagaagtaataagcatctttattcttttaagtatttacaaatgcttccaatcctaaagctgaaaaaaccctcagctctctgaccccaaatgctcatttcacatatgaaggatttgaatgaggagaaatgcaaggacttccttactgatgtctccatttggaagagctgagtctcctgactcacagttagatgctcattccaccacctgtaaagaacaatccctctctatcagcacatttgaaaaccacaattccaatccagggacttgggagtgtgttaccatagtcattatttttatgaacttatttctttctaatgccctatcaaaaagagaaaatgctaaattcttagaaacaactgacttgaaagaggagagtgaagctttctgaaatgatagaaatgttctaagttgtggctgggcacggtggctcatgcctgtaatcccagcactttgggaggctgaggtggccggatcacttgaggtcaggagttcaagaccagtctggccaacatggtgaaaccccatctctactaaaaatacaaaaattagccaggcgtggtcgtgggcacctgtaatcccagctactagggaggctgaggcatgagaatcgcttgaacctgggaggcagagattgcagagagcggagattgtgccactgcactccagcctgtgccactgcactccagcctgggtggcagaacgagaccctgtctccaaaaaaaaaaaagaaaagaaaagaaaagaaaaggaaatgttctgttctaaattctgattggggtggaacttgcacaggcataacttagaggtataaagccatcaagatgtatgtttaagaattgtaagtattgtatccttcatcatatatgaattatgcttccataaaacacagttaaaaagagacatactagttggggacactgtcatatacatagtttcaaaagaaggtgtgttagccccttcttgcattgttataaagaaatatatgaggctgggtaatttataaaaaaagaagtttagttccaagtctttgctattgtgaatagtgccgcaataaacatacgtgtgcatgtgtctttatagcagcatgatttatagtcatttgggtatatacccagtaatgggatggctgggtcaaatggtatttctagttctagatccctgaggaatcgccacactgacttccacaatggttgaactagtttacagtcccaccaacagtgtaaaagtgttcctatttctccacatcctctccagcacctgttgtttcctgactttttaatgattgccattctaactggtgtgagatgatatctcatagtggttttgatttgcatttctctgatggccagtgatgatgagcatttcttcatgtgttttttggctgcataaatgtcttcttttgagaagtgtctgttcatgtccttcgcccactttttgatggggttgtttgtttttttcttgtaaatttgtttgagttcattgtagattctggatattagccctttgtcagatgtgtaggttgtgaaaattttctcccatgttgtaggttgcctgttcactctgatggtagtttcttttgctgtgcagaagctctttagtttaattagatcccatttgtcaattttggcttttgttgccattgcttttggtgttttggacatgaagtccttgcccacgcctatgtcctgaatggtaatgcctaggttttcttctagggtttttatggttttaggtctaacgtttaaatctttaatccatcttgaattgatttttgtataaggtgtaaggaagggatccagtttcagctttctacatatggctagccagttttcccagcaccatttattaaatagggaatcctttccccattgcttgtttttctcaggtttgtcaaagatcagatagttgtagatatgcggcattacccaaatgtccaacaatgatagactggattaagaaaatgtggcacatatacaccatggaatactatgcagccataaaaaatgatgagttcatgtcctttgtagggacatggatgaaattggaaaccatcattctcagtaaactatcgcaagaacaaaaaaccaaacaccgcatattctcactcataggtgggaattgaacaatgagatcacatggacacaggaaggggaatatcacactctggggactgtggtggggtcgggggagcggggagggatagcattgggagatatacctaatgctagatgacacgttagtgggtgcagcgcaccagtatggcacatgtatacatatgtaactaacctgcacaatgtgcacatgtaccctaaaacttaaagtataataaaaataaataaataaataaaaaaaataaaaaaaataaaaaaaaagaagtttaattggctcatggttctgtaggctgtgcaagcatggcaccagcatctgctcctggtgagggcctcaggaagcttccagtcatggcagagcaagcatgtcactacaagggagtggggggtcccagactctttcaagcaaccagatcttgtgtgaactgagtgagagctcactcatcaccaaggtgatggtgctaagccattcatgagggatccgcccccatgatccaatcacctcccaccgctaagccattcatgagggatccgcccccatgatccaatcacctcccaccgctaagccattcatgagggatccgcccccatgatgcaatcgcctcccaccaggccccacctccaacactgggaatcacatttcaacatgagatttggaggggacaaacatccaaaccatatcacaaagtatgagtggagtcatggaggtagtatgcagtgtcagtcaggagagggtcccatttgttaccacgagcttgttactgtgggtacgttgacatcatgtgcattttttagccaagcatcctaataatctgaaatcgttttgctttatcttgggaggttggtagatgtaccttcctttgcttaaatccttctgccttgagagaagtggcacttttcaggttaaactacataaacaagagcattggaatagtgccttggtagcgggaggaaacaaaagaaactgaaaacatagctctactaagacacacttggaacaagtacagaaccatttaagtcatattgtgggtaatcagagccttgaaagtgtgggcagattaatacatagcagtttcttttttatttttcatttatttattttttctctactactgtgacagattaacatagcagtttctttggctttggaggttcaaccttctgaacaggtatcagggcattaagaatgcatcgcctgggaatcctctactattttataaaactcccttttcatggccagccagcccctcactggcccctaaattggctttcccccatttcagccccatttcctggggctgaacttgtttcagagcagccccaggatgtgacttattttgaaagcatagatgtccttctaataccagcttgttagacttttcaatttggttcctgtatgtggtgctaatcctctgtttacttggaattagggtaattttctccacatgtcaccaatctccaacatgttttacttgtcattgctgatctttactaagtgcagtaaaataacaaaagtggtcaggttgtgaaaaacaatataatagtgggaaatcagtcagactctttccactcagctgtgggtttttcatgtgtacacatagctttattttattccttccaaaccttattatagccacaagaaaacagacattataactcagctctccatggtggctgctctttgccctgaataatagagtggggaaggcttttgagccattctcagttcaggagaagaaagagggaaggcaatggaacaatatcacaggctggtcatttaatgtggctttatcaaaacaacttccaagaacaccagctcctgagtgcacctcaaggaagcctgaagacaggcccacccagcccaacttcaacccctcagtgcccaagcatggcctctgggggcctgaggataatcctaccttacccaccaccattgcaccaccattggctcctgagcactccttctgggggcctgaggactggcccacacaacctggtgctaccaccatagctggtaaccacccacatgcactacctgtgggctgggggaatgacagcctgcccagtctgtcatagcaactatcaataccactgcaggctgcttgggagccagagagttgttctgccactgctactgccattgtctgttccccaggggccagaggacctgcctacctgcccagcccactgctatcaccgctggcacctgacaaaaccaccaggagacccaagaatcaacctgcctggacatgctaacaccagtgccaacatatgttgccttggggcccaaggatacgcacacttggcttgccactcccaccactaggacccaaggattggcctacctggtgttcctattcccagtaaaacttcaccacagccttcaaacaaccatatcataagccactgaataaatcacagacacactgatgctatttacagacaaaaaaattacaaggaaactgcattactgcatacaccgagaatcaaagccacagtgctctacacaaccaacaccaaaggtacatcttcaggaaaacatcctcccatatgaaagcaaacccccaaaactggaagaaatggctattacaccagatgggcagatagcaatataaggatacaagaaacataaaagcaagaaaatatgacacctccaaaggagcacagtaattctccggcaacacattccaataaaaaagaaatttatgaaatccaaaaaaaagaattgaaaataatattaaagaagttaagtgagatacaagagaacacagacaaacaatacaaagaaatcagaaaaaaaacgggatatgaatgagaaactttccagagacagatgtcaaaaaaggaaccaaacagaaatcctagaactgaaaatgttattgaatgaaataaaaaaaatacattttaaagttcactaataaactagatcaagcagaagaaatgatttcagaacttgaaggtgggtcttttaaaataacttagtcaaaattaaagaaaaatgaataaaaagcaatgggcaaatcctacatgacataggaaatgtaacaaagtgaccaaaatatttgcattttcagtgtcccacaaggtgtagagaaaaaaaaagaattagaaaatctaatcataaaataatagcagaaaatgtcaagagatttagacatcaaaatacaggaatcccagagagccccaaacagacaaagttcaaaaagatcttttccatagcacattatattcaaactatcaagtcaaagacagagaattctaaaaatagcaaaaaaagcatctagtcccttgtaggggaacactcaatcaaactaatagtgtatttctcagcagaaacctcaggctgagaggctaggagagaatggggtgatatattcaaagcgccgaaagaaaaaaaaagttgtcagccaaggatactatacccagaaaagttatccttcataaatgaaggagaaataaagacaagcaaaagctgaaggaattcactaccactagactggtcctacaagaaatgcttaagggagtcctacacctggaagcaaaaagacagtatctgccaccatgaaaacacatgaaagtataaaacccattggcataatgaacacacaaataagaaaagaaagaacttaaatgttaccactacagaaaactgccaaaccacaatgataatgcagagaaagaaatgaacaaaggatgtacaaacaaccagaaattaattaagtgacaggaataagccctcacatatcaataataaccaggaatgtaaatgggttaaactttcaaattaaaagatatagactggctgaatggattttttaaatgacccaactatatatgctgcttacaagaaactcatctgtaaagacacatatagactaaaaatgaaggaatgataaaagatattccatgcaagcagaaaccaaaagcaagcaggagtagctttactttatcaaataaaacagactttaagtcaaaacattaaaaaaaagagacaaaggttgtcatataattataaaaagatcaatttagcaacaggctataacaatcctaaaaatgtatgcacccaatattagagcacccaaatatataaagcaaatattcttagatctaagggaagaaatatggctgtgtttggtggcttatgcctgtaatcccagcactttgggaagccaagatgggaagatagcttgaggccaggagttcaagaccagcctggtcaacatagtaaaacaccatctctaattaaaaaataaaaataaaaaaagaagaaatagaagatgccaatacaataatagttggggacttcaacaacccaccctcagcattagacagatcatgtagacagaaaattaacaaagaaacattgtatttaaactatactttagaccaagtagacctagcagacatttaaagaacacttcatccatcatctgcagaatacacattcttctcatgagtacatagaacatgctccagaatagaccatatgctaggacacaaaacgtatctcaacaagtttttaaaaattgaaattataccaagtattttctcagaccacaatggaataaaactagaaatgaatcacaagaagaactttggaaactgtacaaatacaaggaaattaaacatgttcctgaatgacccttatatcaaggaagaaattaaggaggaaagaaattttttaaacaaataaaaatggaaatacaacataccaaaacctataggatacaacaaaagcagtgctaaaagggaaatttatagcaatgaatgcctacaaatacatagaaaggtttcaagtaaacaacttaatgatgcaccccaaggaactagaaaagcaacaacaagccaaacccaaatttagtagaaggaaagaaataatgaagagcaaagcagaattcaacaaaatagaaataaacaagccatcaaaacaaaaaattcattttttgaaaagattgaacaaaatggataaactacaagctagatcaatcatgaaaaaaagagagaagaaccaaaatcagaaatgaaaaaggagacattacgactgataccacagaaacacaaaagatcatcagagactattatgaacatctctacaaactggaaaactttgaggaaattgataaattctcagacacatacaacccaccaagattgaatcaggaagacataggaaacctaaacagaccaataatgagattgagtcagtaataaaaagtctcccaacaaacaagagcccaagaccagatgacttccctgccaaagtctgccaaacttacaaagaactaataccagttatcctcaaactattcaaaaaaattgatgcagaagaaattctctctaactcattctatgaggctaatgttatcctgatactaagaccaggcaaggacacaacaacaataaaactacaggccaatatccctgataaacatagacacaaaaatcctcaacaaaatactagcaaactgaatccaacagcacaccaaaaagaatacaccacaataaagtgggatttatctcaaggattcgaggatgactcaaaatatgcaagtcaataaatgtgatgtcacatcaacagaatgaaggacaaaaaccatatgatctcaatagatacagaagcatttgataaaatctaatattccttcatgataaaaactctcaataaatgaggcatagaaggaacataacataataaaagtcatatatgacacacccacagctaacatcatactgaatgacaaaaagctgaaagcctttcctctaagaactggaacaagacgaggatgcccactttcaccactcctattcaacacagtactggaagtcctagcgtgagcaatcaggtaagagaaagaaaagacattcaaactgaaaaagaggaagtcaaattgtccctctttgtacatgagatgattttgtatctagaaatctaaagattccaccaaaaaaactgttagatctgagtttaaaaattagtaaggttggccaggtgcagtagctcatgcctgtaatcccaacactttgggaggctgaggcaggcagatcacgaggtcaggagatggagaccatcctggctaagacggtgaaaccctgtctctattaaaaatacaaaaaattagccaagtgtgatggcacacccctgtagtcccagctactcgggaaactgaggcaggagaattgcttgaacccgggaggcggaggttgcagtgagccgagatcatgctactgcactccagcttggtggcagagtgagactccatctcaaaaaaaaaaaaaaaaaaaagtaagattgtaggatagaaaatcaacatacaaaaatcagtagtgtttctatccaccagtgataaactagctgagaaagaaatcaagagagcaacaatcctatctataatagctacaaaaataaataaataaaatatctaggaatacataaaggaggtaaaagaccccacaaggaaaactataaaacattgatgaaaaaatagaagaggacccaaacaaaagaagtctcatgcttatggattgaaagaattaatattgttaaaaatgacagcccaaagcaatctgcaggttcaatgtaatcactatcaaaataccaatttttcactgaaatagaaaaaacaatcctaaaatttgttttgaagcaaaaaagagcccaaatagccaaagcagtcctgagcaaaaggaataaagctctaggcatcacactacctaacttcaaaatatatgcaaatgttgtagtaaccagaacagcatggtattgatgtaaaaacagacacagaccaatggaaaagaatagaggactcagaaataagcctgcatatttacagctaactgattttcaacaaaggtgctaagaacatgcattggggaaaggataccctctttagttatgggtgctggcaaaattaggtttccatatgcagaagaatgaaactgtactcctgtatctcaccatatacaaaaattgactcaagatgaattaaagactaacataagagcccaaactacaaaactactagaagaaaacataggggaaacactcaggacattggtgtaggcaaatatgaccaagacctcaaaagcatagacaacaaaaacaaaaatagacaaattagactacattaaactaaaaggcttccacacagcaaaagaacaatcaacagagtaaagagacaacctattgaatagaataaaatatttgcaaacttttcatctgacaagagactaatatccagagtatacaaggaacttaacactaaaacaacaacaatcatcatcagcagcatctcattaaaaagtaggtgaaggacacgaataggcatttctaaagagaagacacaaatggccaaaaggtatatgaaaaaatacttatcgctaattatcaaagaaatgcaaatcaaaaccacaatgagatatcatcttaccccagttagaatggctattgttaaaaagacaaaaaataacagatgctggtgaggatgtggagaaatggaaactcttatacactgttggtaggtatgtaaattagtacaaccactatggagaacggtatggagatttctaaaaaaacaaaccaaaacacagaactattaaacaattcaccaatcccactacttggtatttatccaagggaaaaaaattggtacatcaaagggatacctacacccccatgtttattgcagtagtacttacaatagccaagatgtgacatcaacctaagtgttcatcaatagatgagtggacaatgaaaatgtggtatatatacacaatggaataatcttcagccacaaaaaagaatgaaatcttgtcatttccagcaacatggatggaaatgaggtcattatgttaagtgaaataagtccggcacagaaagacgaatattgcgtgttctcactcatttaagagctaaaaaagttgatttcatggaggtacagagtagaatgatatataccagaggctaggaagggtgtgtgctggtggggaggggaagtgaggaggaaggatgaagagatgttggttaatgagcacaaacatacagttagatagaggaaataagttctaatgttcaatagcaaagaagggtgactatagttaacaatactatattgtgtatttcaaaatagctagaagagaggacttgaaatgttcctaacacagagaaatgataaatacttgaggggacagataccctaaataccttgacttgatcattacacattctatccatgtaagaaaataccacatgtaccgcagaaatatgtacaaatagtatgtatcaataaaaaagaattgagatcaaacattgatcatatcaataaatgtaatcacaaattattttcagatggagtaacaaagcaaattgacaatatgttgtatacaagacaaatcaaaaccaaaaagatacaaaaggttaaaaataaaggaatggacaaagatacatcaggcatatgcaaataaaaagatagcgggagtctcaatgttgatatctgacaaggtgaagttaagagtaaaaggtgttttttagaaagacaaaaaaagacaccttataaggctaaagtctacaaagatatattaatttattaatatattaactttaacaatatatattgttaatattgttatgcgaagtaacaccttaaccttcataaagcaaaaattagaagaaatatatggagaagaaaaaaatacactaacagtagaaaactgtaacatactttgctcaattccaaacagatcatatgggtgaaaaatcagtaaatatatatgatctatgcaacacaataattacgtagatcttataaatgtctaactcttaactgcaataatggaaaaaaaaggaaacatttttttcattgtatatggaacatttataaagactgtatctcatgccacaaagaaaacttcaatgaattctaaaggattgcattctgattacaaatgatataaattaattacaaaattagaaaacataatatcccagttggaaacttaaaaaaacccactattaaataaattcttgggtcaaagaagaaatactaagtgaaactgcagaacttcttgaaaataataagtagtaaacagatgaaaaaattatatagctatatcaataaaataaaaaataaaataaatagctaagtttaaaaaccaagaaaataacaacaaaacagaaagagcagagggaagaaattaataaaggtgaaagaaactattaattttaaaaacctacttttttgaaaaaataaaatagacaaattgatagctagcccaatttgcaaaaattggagaaaacacaaaattagaaatgtcaaggggaaaaaaccatcaaaagagaggaaattttaagaaatcattagcgactactttgtacaactctaagcaaatacatttgaaaatcttaacaaagtgaatacatttcttagaaaaacacagtataccaaattgaccccaatgaagagctataaaaggcctatcatacaatcttctataatagatagttgcatagagagagaaagttattgaaataaattgcaatgatgtttctgcacaccttgagaaaaacctttccctaaaatgtttcccatcaggactgagaaaatgcagtcatatcaagttaaacaagaaaagctgattagattgcatttataatccaggaaacaattttgttttgatgagtgaactcagcctggaaagagcatgaaccaggaccagaattaatccactctgatgaacaccaatgtccacgatgacctcaggaagataaaacaggccctgcagttgacagctggcagcaaggctgtgaaaagccgtgctcccagaatgtcggcagtcatcaggcaactctctcaccacatccaaaacaaaccctctacaaccccccactttcctaaacatctcttttttctggctaacattgagtaattattgtttctttaccaatgacaactctagtcccactttaatctgcctaccatctagataaaaattattgagatatctaattatgagcttgcccctcctccctgatggagctggatcctgagcaggaccctgctgctctcttaaactctccttatagacattcccagcacatgcccaaatgctgtaataaatcactcccaagtcccttctcccaaggtgcccagtgatttccctgctgtgcgtccccccttttcacagcaaggtcagtaaacctaactttatcttcgactacagaagtgttcctgacagtctttggtgggtgaacactgacggatataagtgtactaatgccttgcaaccacgcaactcataataaaatctctgaacaacgtcccattccaaaaattaaatgtagtaacaaaagtaattttaagaaagagacacaaggctgggtgcggtggctcattcctgtaatcccagcactttgggaggccaagacaggaggacgatttgagcccaggaattcaagaccagtctgggtaacatagcaaaaccccatctctaaaaatctacaaaaattagctgggcatgcaggtgcttgcctgtagtcccagttactcaggagacaggtgggaggactgtttgagcctgggaggtccaggatgtagtgggctgtgattgcatcagtgcactccagctttggcaacagagtgagaccctgtctcaaaaaacaaacaaacaacaacaacaacaaaaacaaaacaaacaaaaaacaagagagagacaatctgtgtggaagagatttaaatccaccacactgacacaaatctttcttttcctactcacttttctttacatggtcactgtttgggagaatttcctgtagtctcaataccattttaactccctctcttgtgttctctttccattccttcactatgcagaataaccttgcctctctcccagcaagaacgcctcttccctaggagaagggaggggaaatcaggtgatttcagggttctttttggtgggctcagggagtggggaagactacgaaactgtcccgttcagctttggtcctacactacagtttgacaatttatgagcaagttccttttcattaacacaatccatcctctcaaaaacggagaagtgttggccatttctattcttccctcttccctctgcatagttgagggaaaaacaaatctcagaaaggctaagtccattcagccagtaattagcaggctcctgttcaaagcttttcccaagcaggtcctctatccagtgcctggttacatttaacgccagtgatagttacaaaaccaccacctcccctgatgagctcctactgtgtgctaggctaatgctaggtgctttctatccatgcttctcaaactgtgatatgcacacccatcgcctgggcacattgttaaaatgcatagtcttttttactttttagagatggaatcttgttttgttgcccaggctggagtacagtggtgcaaccatagctcattgctgccttgaatttctgggctcaaacaatactctcacctcagcttctcaagtagctgggacgacaggtatgtgccaccacacctgactaattttttaattttttttttttttgtagagacaagatcttgccaccttgcccaggctggtcttgatctccttggctaaagcgatcctcccacctcggcctcccaaagtgctgggattacaagcgtgagctaccatacctggcctaaaatgcatattctgattcagcatatctggatggggtatgagagtctacatttctatcagtacgttcttggttaatgacgatgatgcaagtctaccgaccccactttgagcagcaagtttatatgcactacctcacataaacccacacaacagtgtttctcaaccttgactgcgcttggggggatttaaagccttctaatcctcagatgcagcccacactaatcgtgtcagtatccctggtagtaagagccaggtggttctcatggaaagctgaagttaagatgctgtatgggctaggcagtagtacccccatttggtggctgaaaaactgaagtttagagaaattacctcacccaaatgcctacatgtagacagtcttgtgggcagattttaaacccaagcatgtctggctccagagttcattctctcagtcactactctctaaggtctcccacagtaacaacaccagatttcaatcaattgttaactgaggaaagcaggcccacatatatgaagccactaggaagcagtctgagcccacagatgtcctggcactgagactctcagtatggcttgcagtcctttaacaataggagggtagaaagctctcctcggggcttaagtgactcctgctccgactgacccagcacaagccctggaactgattatgcctcattggtttcatggctttccaataaatgctgattggtcagagtatttcctctcccattgagggtttaagtgcaagagaaagccaggtgcattaaatcagtgtaattagctctgaagtgttggtgattaaggaagtggattcccagagagaaagaaaccctccaaggctttatcaagctggaattgtgaagccctaggctggacagcagccaaatgtctgctcctttctgatgggaagtaaaggattccccgagggatggacttgctggcaatggctgggcttagtctcccatctgggaattcattaattagggcttagctttgaaggcagataataaggtaatcaaaaggggaagtgaagccccacaattcatgctgtttaatgagtaatactggagtgagcagatgaggagagacctgtcagaataggtagagtgtctttcttttttttgttatacattttttaaaatactttaagttctgggatacgtgtgcagaatgttcagttttgttacataggtagacacgtgccatggtggtttgctgcacccatcaatctgtcaccgacattaggtatttctcctaatgctatccctcccctaaccccccacctcccgacaggccccagtgtgtgatgttcctctccctgtgtccatgtgttctcattgttcagttcccacttatgagtgagaacatgcgatgtttggttttcagttcctgtgctagtttgctgagaatgatggtttccagctttatcgatgtccctgcaaaggatatgaactcatccttttttacggctgcatagtattccatggtgtacatatgccacatttttttaatccagtctatcattgatgggcatttgggttggttccaagtctttgctattgtgaatagtgccacaataaacatacattgcatgtgtctttatagtagaatgatttataatcctttgggtatatacccagtaatggtattgctgggtcaaatggtatttctggttctagatccttgaggaattgccacactgtcttccacaatggttgaactaatttacactcccatcaacagtgtaaaagcgttcctatttctccatatcctctccagcatctgttgttgccttactttttgtgcatgacatgatgtatatttagaaaacctcatcatctcagcccaaaatctccttaagctgataagcaacttcagcaaagtctcaggatacaaaatcaatgtgcaaaaatcacaagctttcctatacagcaataatacacaaacacagagccaaatcatgagtgaactcccattcacaattgctacaaagataataaaatacctaggaatacaacttacaagggatatgaaggacctcttcaaggagaactgcaaaccactgctcaaggaaataagagaggacacaaacaaatgaaaaaacattccatgctcatggataggaagaatcaatatcgtgaaaatggccatactgcccaaagtaatttatagatttaatgctatccccatcaagctactattgactttcttcacagaattagaaaaaactactttaaatttcatatggaaccaataaagagcccatatagccaagacaatcctaagcaaaaagaagaaagctggaggcatcacactacctgatttcaaactgtactagaaggctacagtaaccaaaatagcatggtactggtaccaaaacagatatatagaccaatggaaaagaatagaggcctcagaaataatgccacacatctacaaccatctgatctttgacaaacctgacaaaaacaagcaatggggaaaggattccctgtttaatgaatggtgttgggaaaactggctagccatatgcagaaaactgaagctggacctattccttacaccttatacaaaaatcaactcaaggtggattaaagacttaaatataagacctaaaaccatacaaaccctagaagaaaacctaggcaatacaatttgggacataggcatgggcaaagacttcatgactaaaacatcaaaagcaacggcaacaaaaggcaaaatagacaaatgggatctaattaaactaaagagctttctgcacaacaaaagaaactatcatcagagtgaacaggcaacctagagaacgggagaaaatttttgccatctattcatctgacaaagggctaatatccagaatctacaaggaacttaaacaaatttacgagaaaaaaaacaaataaccccatcaaaaagtgggcaaaggatatgaacagatacttctcagaagaagacatttatgtggccaacaaatgtatgaaaaggcttatcatcattggtcattagagaaatgtaaatcaaaaccaccatgagataccatctcacaccatttagaatggcgattattgaaaggtggagtgtcttaagctaccgtcctgaccactggttttgaaccaaagagccaacggagaaatcttcggataagagtataatttaaaatcagtaatagtgcaactttcctacaacagcctcctctctccatcttctttgcccccatgaccatctcatcattccagcaaccgagaccacaaaatatctgctcgccaagaatgctgcctgggtccaaggccaaaccagctgtctgggcaggcagggagaagaggcctcctgctgggccacatgctctctcaaagagaacacaaataagaatgcagtgtttacacacaaggatcaaacttctgttttatgctttaaaataggaatttgggggtattacaagattaaatttggctgtacatttagaatcgcttgggagaccatgtaggttgaggaagaagcatgatgaatgtaatgaagatgattttatttttcaggttttcttccccgcattgtgaaatccgtgacactttctgacatctaagtactggcttaaaagttttccaatgctctatacatctctacagctttgcttctgatcaaaggtgaaaaaagcccaaagccttgccccaaatgtcacctttttgggtgttctctggctgtgactctcctgtgagtaacacagtttggaatcgacttgaatatttatatgtcaccaaattgatgacacacatggcctctctctccacaggtgtccaacaggaatggaaaattttttgtgtgcgacttcctctctcttttgcctttccctcttattcatattcttccccttccagaaaaaaaaaaaacaaaaaacactaagtttcttagatcttaccaattttgcagcttctggtggcctctgatatgaattagaggcaactgatttctgccaggtaaatgaactcaaagtctctaagcggaaaggaaaggctgatggatatgtggcatttccactccagagagaaatctttccccctttttcaagaacctaaaactcacatatagctcacgttgctagaggtagttgcttgttggaaaccctcagcagatctaaatgatggatttcattacccacatccctaattatgttacaaagttctccctcaataccttggtatggtaaagctttctgacaaaccactccttcctaatgtatatttttcccctggctggggagagagggtggagaagaagatgggcaagaaggtggtctcaccatgtatagaatgtcttttcattttatgcagccatggcattgctctctcatctctaaacaattggctcccaacctggccacacaactgaaaccacttagggaacctataggaatcctggtgctcaggctgtaccctaaaccttttgcaactcagtgtttgtgatggcacccaggcatcagtagttttttgatgacagtagttttaaaatctggctgcacatttagaatatctcgggaagctttagaaaatactgatacttgctcctactcccagagattctgattaatgaatgggtctgctgtgcagcctgaacactaaggattttgaaacctcgccagatgaatcaagtgcacagccaaggttgaaaaccagtgctctaatcattttcttcttccgcattttccagcttgagggccaaataattccttgctggttaaaggaaaaattccagtgattactagttgatctattcatgtgactcattttcatgatgattcactgcactgaatatacaggcaatatagaatttttaggcagaaagcctatagtttatgactttattctacaagtgctccctctctttgagttgcagtccactgctctgagtcataataaaccataaataacaactaagaacaatgggttacctgagccactgctcctatactttcatttttaattgaattctaataactgggttgctagagaaactcagataatgcaacctacctggactttcgtaaaagagccttgaaactcttgaaaatgtttatgaaaaaaaaaaatccctcgtgtgtatggggtcacacggattggcgagggaacagcagtccaaagaccaggaattagagatactgtaaatgcactttgctgtcttcacatccacggaagataaaagtatgttaaaaatcagaggggctattaaaatgatttttaaaaatattaccttagaatgtctattagaagttgaggatgaaatttaagatcttttctagtcctaggattctatgtttctacacgacagtttgttataatcatatccatagtaaaaaaaaatgtttaagaaaaacattagacctaggaagtttacagattcaatttagtgagacacttatgtatataatacaacatattcaaggatgcatatgtatgtagaaaaatatactgagaaatgaggatgtatctttatgttgtctctgactacacattataaaggcaaagtcaataagaagaatcttttaaacttgaagtggtggattagacttcagattgctaatttttaaattctgtaatttcagacaagtccatgtatgctcacaactctttcactgttattaacaaagacttatttactattgaaacaagatataggtcatgcgttaaacaggaaatattagggatgacttctgccttaacacttcctcaactaagagtcgtttcaagaagtaacatggttaacacgtctgcctgtgcattgtgctggaatggataatatgtcttctttccctttgctgtccctgaatactcttgggtgaatatgttaagtaactaaaaaggaaggactgggaaataagactgagttacaaaggcatggagaatattgagggatcaattatacctgctgcatactcaccaaatgactgtagacctaaaaagagggaatctcatatgtccagccttctttaaacatttcattagttcagtttgggaaccagtctatatagacacctacattgtgggtcaagtcaattagagtgtaggatatgagatgacttcccttcaggtctcatcaaattggcttattgcaatgagcaaaacaggaaagtggtggccataagcttgtgtgactgtcccacattccagtgcccccactatgtagggaagtctttgcaaggatctatcactgtatggattaacagtcaggacagagtcactaaagtctaaagtgaactgtataaaaccaggaccatggcccctcattcacagtggaatgaggacaacacctaggacagtaggtgcttcctaaatatatgatgtattagtgttcagtagataccatttctcatttctcattctcttggtcatccatcactctctaggcaggctcagggttgcttgagaaagttggcgccaattgcaccccaaggagaaagagactcggatgatggtattgactttcttcctcaataaccacctggccttaatgaagccgtctgaactctgtgctcagctttcttctctggacacttacacacaatcttctcccttctgtccaccttacaaaggtattttaacaatcaaatggataaaagaaatatgaaagcactcaatgacatccatcttggtatacatggattcttgtttgtagcaggccctcacaatgcttttaacagtgaataaggtaacctcaaaacccttgtcttcagcctgtattgtactagccttgctttttttttcctccgagtccaatttaaggtgagataattacctggcaggggagataccctgattacgatttagagtgagatgagccaaaggccatggacagcctcacatttttattactacggtttctacagcatctcctctatgatgttattatagatgcatattcactgacatgccccaccttcctatgtctccaacgcatggagcatccctatttccatgcctttgcccagactcttcccctcatttagagggcctttccctccctttccagcataaccaaagtttatgtgtcctacaaacttcctctttcaagccttccccaacattggtctctctctctctcctcagaatgccaatgctattctatataattatcattttagtgtgtgattttcttgtgcatccaactagattgtaagctccacgaggatgaagaccatttcttattctttcttggagcctgcccagtgagaattacacagttattcattatgtggaaattgtaatcttccagcttatagtacagtctagtttgcatatttacctagtttacatccatgataattttgcagagtgatgagctgtatgtataatcccccaagtaagccctaaggtgagggaacaagttaacttgtgccagcaaagaaaaaaaaatcaaggaaagaatatagttgaacaattatgcttcttagtgtaccccaagggtatagatatgatcctccaaagagttgtccagcacccttaatgtcactggtttacttgatgagagtcctgactggagctgtcctcagctgtggtgctgaaaggttaactttctagaaacactggatagcctgaaccatgaacaaaaacagctactgggagaggggtgggtcttttcctaagtgatcttcaggcccctcaaactttgcagtctcaaatgaaattcattttctttcagacgcccttttcttcctcttatattccctaagtcttggcatccctacttcctaaatagcttttaaaaccaatttctcctctccattctcattgccactgcaacaatttccctaactattttctctcagatgtcttgctactcagtgtctgcaattatcaacttccacccctgatgcatacagaacttaattcaaggtcattaaagtgggcaacaggtagagtttaactctgccagttaaactataaatagcaacccaaaatggatgagaacgatatatatgaaaagctccttagagataaaatagttccagggccagaaacaggaaaagtgaaaaaagcctgtctgtgtgagccaaaccaagtccaggcagagaaaagatcatgttcctgtttaaagaagtttgtgaagaatatgtgttgttcacaaaggggagagccatcagtagctgggaagaacgtgagtttgcaacaaggaagaactggcaatgtccatgtgagcattgctcagggaggtttgccccaaatgcaactctgttagatcaatgtaatgtgctagctgttctcaattggcccctccattccttctctggtcttgggaggctggcacgaataaactgcatccatgggttcccttgccatgtggctttgcattggctttagttaatggaaaacacagcaggagataaaagggggagatgagagtcagtttggactattgatacctcctgctccattccatgctggctgtcctgacttaaggccgcagcttcttcactatggtttctcctacagctctctttctctgatttccagttgccactctttccctcacttcttctgacctagtggtagtaatagtgtactgaactgtccccatagttatccaatttgagtgtgccatctgtttcctgctgggaccctgatcggggcttgatatcattaagcattcaaatcccaactcccttgtttcaaatcttatcctctctcagcattattctgttcataaattggtttcatatgtaaatccatgtacagagagagaatgtactggttgtgttgacacaagcattcttttctgcctgacatgtttatttctccttgttaattaagaaactggcattctgattttatcccttcatattaaattagctttgttagtgcaagtcagcctgtctgggattaattctgaggtgttgccaaaactgaggatttgggcttaattcacttagatgctattacccttgaaggcctctagggaccatccattcccaccccccccccaccagccccccacaagctacttggaacttctggccaaggacttatagctcaaagtacttatagtttctcaaccatgttatactttcatgcctctgggcttttatccaaactgttatgtctttctctgaaatccactctttcaaaacactgtttaggcataatttcttctgtgaaaccttcttaatctttttcagaaataattctctttagtggctattcattgagcaccctttactagaaattctgagatgtcctggagacatgcaaggtggctcagacattgatgcttttcagtttcatacttgagacaaagtgataaaaaaaaaaaacctatataaatgacattgtattagacaattcttgtattgctataaagaaatacctgagactgggtaatttataaaggaaaaagttttaattggatcatagctctgcagaagaagcatgctgctagcatctgcttggcttctagggtggcctcaggaagcttacaattctggcagaaggtgaagagagagcaggcatgtcacatggccagaggagcaagcaagagagaaagcggtggttgagttggtgggtaccatgcacttttaaatggccaaatctcatgagagcttcctcactatcatgaagacagcaccaagcccccatgacccaaagacctcccaccaggccccagctccacctttggagattgcaattcaacatgagatttgggtggggacaaatatcaaaactataccattctgccccaggccctttccaaatttcatgtccttctcacatcaaagaatacaatcatgcttcccaacagtcctctaaagtcttaacttgttccagcattaactccaaagcccgaagtctcatctgagacaaggcaagtccttttcacctacgatcctgtaagataaaaaagttagttactcccaagatacaaagggggtataggtattgggtaaacatgctcatttccaaaagagagaagttagtcaaaagaaacgggctacaggccccatgaaagttcaaggcccagcagtgcagtcattaaatattaaaacttcaaaataatctcctttgactgcatatcccacatctaaggcacactggtgcaaaaggtgggctcccagggtcttgggcagctctgcctctgtagctttgcaggcttcagcccccacaggtgttctcacaggtttttgagtgcctgaagcttttctaggtgcagagtacaagttgccagtggatctaccattccggagtctggacagcagtagagctagtccccactagagggcagtggagtagagagcccactggggcactgcctagtggaatcccgttttcacagctcctctaggcagtgccccagtggggactctgtgtgtgggctccaatcccacatttccactccacactgtcctagtagaggttctctgtgggaggtccacagcaggcgtctccctgggcacccaggatttctcacaacctctgaaaataggtggaggctgccaagcattcactcttgcactctgctcacccacaggcttaacaccacatggaagctgccaaggcttatggtttgcattctccaaagtggcagcttgagctctgcctgggctcctttgatccacagctggagctggagctggagtggctggaaagtgaggagcagtgtcctggggctgtgcagaaaagtggggccccaggcctgactcactaaacaattcttctctccttggcttctgggtctgtgataggaggggctgcctcttaggtctctgaaatgcctttgagatctttctagttttcttggatattagcacttggctcccttttagttatgcaagtatttcctctagtaagtggttgctgccagcttgaattcctctctcaaaaaaagatattttctttctctgccacatggccaggctaaaaattttccaaacttttagttctgcttcttttttaaatataaattccaactttagttcatttctttgctcttgcatctgagcataggctcagccaggccaaatcttgaatgctttgctgcttagaaatgtcttccacctttgacagactgcccatgtatgccgccagataccctaaatcatcactctttagttcaaactttcacagatccctagggcatggacacaatatggccatgttctttcctaaggcataacaagtgtgtcatttgctctaatttccaataagttcctcatttccatctgagaccttgtcagcccagacttcactgtccatatcattaccagcattttggtcacaactgtctagtcagtctctgagaaggtccaaactttccctcattctcctgttttcttctgagccttccaaatccttccaacttccgccaattatccagttccaaagtcacttccacgtcttcaggcatctttatagcaatgccttactcctcagtaccaattttatgtattaggctattcttgaattgctatatagaaatgtataatatataaggtatattataatttgtatgctttataaattacaataattatataataaatttataatataaatttatatttataaatataatttataatgaaaagaggtttagttggctcatagttctgctggctttataggaagcatggtgctggcatctgctcagcttttagggaagcctcaggacgcttacaatcatgattgaaggtgaaggaggagcaggcatgtcacatggtgaaagcagaagcaagagagagagaaagagagagagttggggaagaggtgccacacacttttaaatgaccagatcttgtgagagcttactattatgaagattgcaccaagccatgagagatccacccccatgacccaaacacctcccaccaggccccacctccagcattggggattacaattcaacatgagatttgagtggggacaaatatccaaacaatatcagacatggaaagacagaagcatgcataggatgctatggagacaggagggtgggggcagtaggtgggcaagtgtcaggggggaaggcgatctgtaagagatggcatgtgacttcagctgtgaatgactgactgggacagcaaagatcacaaagaatgaagggccctctggggtttcagggcaaattatctggagtccattaaactagtaaccaccctttgagtggctccttatgcaggggtggccatgtctagaacattgaccctctcactgtggcccaagctgtttggagcaggactaggtaccagatcagatggcagccactcaacaggctggccagtgacctatgagcagcctggcactggtgcagctgtgttgtataaatgaaccaaagagggcctctgtgttttggcctctaggctatttcttcatagcaggctgagacttgttggctaaaaggctacaggcatcaaactcaaaaccatttagagcccactgtctttgccaaccctgtgaaagtacacccagtatctgctggccattgataagataagagtcttacggttttaagaccctaagccacccctgcccctcggagctctctgacccagagactccccgctgtgcctcacctagtcacataagccccactctgatccctttctcccctgggagttcccttgacctcctcctcttctagaagcttctggacagtgtcatactgtaagggacttcctctctcacccaaccctgttcaagcgccaaccaataaatcttctgtgttactgtttcttatgatcatgtcttttcccttaatcactagagaagaagaagatagtagagagttcccaaatgactttttagatcctgaaccacattctggtctccacaagaggctgtgtcttggttcccatcccaccctgaggacatgccactccatgtaaattccattctgatagacaataacccctttcctaaggcagtcctagtgtgtctttattctttgcatctaaaagagcctgctcccacacaggccataggaagaacacgagaggtctggagtaggagactgtgtggtgtttcagggaacctcaggcaatttgatatttctggaaaagatgatgccagttggaggtttggtggaaatgacactgcagaggtgaatggggtcaggtcacaaagtccgtgtgtgcattccgctgagagtcccaggcttcatcctgcagggagacactgaggttttaaaggcagtagaaatgggttggacttagcatattcattaggtcactttagcaacaaagtagaaggagtttgagacgagcaagaaacaagtggagaggaagtgaggagagaatagatggaatggagaggaggggatatattcaataaatacttaagaaataaaagcaacaagagttggcgacattgctttggggttgacagaaagatgcacaaatctgtgatgaatgattcctgtttttcagattttggcatgggatgaatggggtgacttagattgttgtagaagagcaaattggagcagggaagagaggaggaagaggaagaagatgtgtttgaggaatgcacaggacatccatgtagagaaacctgtggacagttggctccatgcatcagaacttcagggtgagtcctaagtctcatctcggcagcatccatcatcactcagactcatcctgtgctgctgatttcatcctgtaagatggactggactggtccttcatcccaaagccttgctctatgtactctggaaggccagcaaagtttcctgtatcatcaacaccttctcaaaacatgcctcttccttctggacttagatgggccctcctgtagggccccctttccctcatagctctctcaagtggaggctgtttttaatttatttatttttcctgtatccagcacaagttctttggggtcaggaagtggggtctgtgtttttaattacgatttccacattccagtcatttttcctgtaagccccagtgtctctgaggattattccgtctgtcccgcttcccctcttcctcattgttgtaattcaccaacatcctcaacactttctgtcattcaccaaagaagggagctcctgttttcagtcttctcctgtcaacattagcttcattctgaatgattttcttgtccatatggaggaatcatcgaccactgtggatcctcattttcttgacttactcatctccaaagacttctccatttcaactcgcacgtccattcctacagtcaaaccctacatcaaaagttctgaaatggcaatttcaaacatcccactctccaaccaccacttcctgtcaagtactccactgaaactatcttttgactttattgaaacctttcaacttttagtcttcattgcttaccattgtctagagctactgcatatttattcaggtcataggctttggaattaggatgccaggttaatttgttgggggaggccaccaagatgtggatatatcatttaaaaaataaatctaggttccagaattcatcttggtggttgggaaatgtgagtgtgggctctgcagagaaatgggcatcaataggttgtttttaccatagccatggaaggaaagcaggagaagtgctggaatccatccctcacatatttccctcaccacttatcatctgtctgcagtgccgtttggctcagtcacttagcacttaatcaggtactctttaatttttcacatctgtctgtctggagcctagaatgtggtcatagaaagctctttgggtctgtattcaaaacaatggaattcagacacaacttacttcctgtaaggtcttgagcaggtcatttaactgcacctgaaaatgaaaataactgtccccacctcaaccagttgttgtaaggattaatgagataatagatataaaagcatttgataagctttaaaatgttttaagaacataaggtctactatcttccagtgataattgagaatagtaattgtgtgttccttgtttgcttcattaggcaaggtgatcaaaaatatttgtcaaatgaatgcataaattaatgaatgaatgagaagtgagtgagtgaatggacaagtgaaaaaatcaataaatgcctaaatgcaatctaagtctcaggcattttgatcgcaggctcacaaggagaattggctgtctgatcaggtaaacacttgttaatattactcattaattgttcacttaatttgacaaacagattcactgcctaccacatatctggtagtatgtgttcctaattactgtctcatccaaaactcacagtgtctgtgtaaagaagttcttttgaatttcatactacagacgggaaatcagaagcacagagaagttaagtaaccttccaaagttcacacaagtagtaacttatagagcttggaatacagacaaaaggtgcccccaagagaatgaaatggagggaatgatagttccaatagacagttcttcactgtgagttggggtgagaggggtgggcttttatacctctgcatccactagtcattggatgttggatgtcctagggaggcagcttccctgggaggaactcagcacctggatgatcgagtgcctccattctgaaggtggatctgggcagcaaagcacagcatataccatgttattaatgcttctaaagagtgtgttagccagcctgggtagattcagtcaaataaagacggattgtggagaaagcagaaccccagagacaagggtatccatggaagatctgcgcagcccatcacccagatcctcttctagggatggctgcaggggcaatcccagcctggtgccaggaagccttcctgttatccagatcaaacttcttgctcttggcccaagctcctcaggaggtatttggacttcccatacctcttggctacagagaacaaatgaatgcagtggcattctgccctgagaggtcagcccccgtcgtcttagttagcgtgagtcccattcccaagtcccatcacctctgggacaatgagaagatcaaatttctgagctgacagcaaggaaatggcccctcatggaaagctgtctgagaggccaacagacttttcccagaccaataccatagtcataatcattcttagtgaactcagaccctgtagtggagccaaccaggcagataacagggattatagggaattcccgggaaagaggggtccagacaaagacatagccaagaaatgacaatgaaaatccatatggactgggatgtcactgagtgggcaggtgtctcagtggttgaggtcagcatggtagcctttgagggtgtctaagtgggaaaataaacccaaagtgtttttccattctctcactcaacaacaatcaacacagaagacttctgtgaccaaatgtgtggattctttccccattcagtaagcaaccaattctgcagtagacactggctgaatttcctctgattcaattctgacactatctacctggaaatagcatcacatcccacaggttgagggctcagttctacaaaactgccttccacttccaatgccaacagcaagccccaggctgtttttacctgtgcctgtgactgactggctataaatcatggttctcaccacccctaccctctccttggcttcaattcatttgctagagcagctcacggaactcagggaaataccagatttttaagatacagatgaagagatgcatagggagggtgataggagaggtgcagggcttccatgccctccagatagagcttgtaggaccccaccaggaacttccatatgttcagctatctggaagctcctgaaaccccatcctttagggttttaatggaagcttcattacataggcatgattgattaaaccattggccattggtgatcaacttaaccttcagttcctcttccctccccagaggtttgggattcccatacagctgaaaattcaagctctctaaccctgctttggtttcccagtgaccagtgaccaaccccaccctgaatctatgttaggggctgccagccaccagtcaatcattagcatacaaaaaccatcactttggggagattcgaaggattttaggagttgtatgccagaaaaggaggttgaagaccaaatatgtgttttacaatatcacgctgtgtcagcgtggaactgagcattaaaagatgaaggagcttgagtttttaatggggcaggaccaaataaggaaaagtaggcacatttattttgaagggattaaccaatcttattctgtgttttagaaacagtctaatgcaagaaaccaaaacgcaactgagctcatttaaataaagaaatgtcaggctgggcgccatggggctcatgcctgtaatcctagcactttgggaggccgaggtgggtggatcacccaaggtcaggagtttgagactagcctggccaacatggtgaaaccccatctctactacaaagtacaaaattagccgggcgtggtaatgtgcacctgtaatcccagctactcaggaggctgaggcaggagaatctcttgatcctgggaggcagaggttgcagtgacactgaaagaggaaggaggttgcataaacacatcaaagccatttctttataagtgatttgaggtcagtgatttttgctaatacttgtgggagcataatgaagcaaaagcatgattaacttgctgatattcaatgactcttcactgaagctcaagtttatatgcatttatgaaagagtcatgaacacttttccttattttattttatttttatttttgcagacctctggagagcagattaggatatcaaagtgtaacagaaagcagaaaaaagtttaactgaaagatgaaaaactttagatgcattagtgctatggcaaacagccagatcactccaattatgtccctaattgggtccataaataatttataacccaccatttgtgtctggggcaaaggatttctaacagtaaatgcttaagtagtggttagagggacctaatgatttccaattctgaactcatcagaactcctctaggctgtgattccaacagcccttcttgaagtaatttggtggggattactcaagtatggggagaaattgtcttcagtgtctaggtgaaacagactgtcagagaagtaatgagctcacctccctttgctgctaaccttgccactggctttcatttaaggtcaagagccaaagccatgaaaatcagaaataaaagggggagcaaagcttccagaggccctatgattagtagtaggatttctctcatttcttcatgagaagctggaggtaatttctactgcctaagagtctgcactaattgttttaggtatttgtatgttgcctgttaattttcacagcttctccacatcttgtttttcttttaatgttttagttgaagtataataacatatatacagtacagtggatgaagtgcacacatcttaagtacagagctcaatgagtgttttgcagatgggtttttttcacgtagctaacacccagactgagatgtaaaacattccatatcccccaaaaggtgcttctgttccttcccagggtgtgtgtctcttggaggagaaacccggaggatgaagcaaagcccttgaggcttggctactttaggattcatgtgctgtctgctgcaagaagacattgaacaagtgagagcaacatctcagcatttctgagcagaccatttaaaaactcaaatgcagcagagggtgcttgcgagtgagatctgtgtgggcctgcaataggagaaggtcttgttcacttcctgccaaaagcagtgaaggtttacagggccccttcttctgtgtccccatccagggaagccacagcagctctatccgtgagctccttcaaaggttctacaatccctggaaggtacttgcatgacacaggacaagcaacagactgaaagtttggtttggccaagggacacctggaggtcatctgctattggtcacttctgaagaagaatgaggctgaggctccctcagagggcctaatttgtcaaggccggtaccagcaatgaacatgcctggccggggtggaagccccagttttccttttacacatagcttttaacccccaggggagggatagctggtagctcatacttgctgtacatttattaagtgctgggtactacgatgaacacttcacatcaatagtctcattaatctgtaacttgcattgaccaatttctccattttagaaataatgaaacagagggaaagacacagttagtaaaagacggcctcagactccagaccctggcaatcctgttccagggcctctgagcttccccacactgccccccactcccacttcccagacagagcttctggggatcccatgtacactcagcacccgacactcgcagtggcactggcctctgggctgggaaaagaaacacaattcactcgacttatgatttaattaaatttctgaaccatggcagcagatctatacttcataaattaaaccctcatttcctagaggcaaaaagttatgaattggtgttctgttcctggaaattcattttatttcgtaaaaacctaaaagttgatcatgaaaataaaacaagatatacaacacgcacacatatacacacagagatttattaagtagaaaaaaacaagtaatatgaaaaccaaatgttataaatgttaaattgggtggacttttctgcaagggctggatgactagagtgtcttaaaacatgagttaaatgagatttagattgaaaatgccttccacatttttgagtaaaatttctaaggaacaaaaataggcaattttcattgtaccaaggacttttgaagtaaggtgaaaatcgggggtactgttctaaaaaatgttcatggcatgaaggcacctgaatctctgggtagtgtactactgctttgatcatttcttctgctctgttaaaagttgccaaatgactgtaagtatgagtttggtcattacagtgggggtcttatgatgagaaagactgtcatgatggaggggatagttcctgtggtggaaagtcagggatttgcctgactcttagctccatggacacactcacaaagcctctatgggcagcccctctgtctccatgccctacagggcctccacctggccacctcgttgggggggtgggcatggcacggggaaggctctcaggcaatagggctagaggtgagataggaatatacacagggttgacggcagaataatgaaaggaaattgaaggagtaattcccaaccaatggctatctcattttttatggattacctgtgatggttaattttacgtgtcaactcgactgggtcatgggatgcccagatatttagccaaacattattcttggtgtttctctgagggtattttaggatgaacttcactaaattgatagactgagtaaagcagattgccctctgatatggtttggctgtgtccccacccaaaatctcatcttgaattgtaatccccataatccccatatgtcaagggacagactaggtggagataatggaataatgggggcggtttcccccatgctgttctcatgatagtgagttctcacgagatctgatggttttataagtgtttggtagttcctcctgcattcattctccttcctgccgccttgtgaagaaggtgccttgcttccccttcaccttccaccatgattataaatttcctgaggcctcctcagccatgctgagctgtgcatcaattaagcctctttcctctataaattacacagtcttgggcagttcttcatagcagtgtgaacatggactaatacacactccctaatatgggtgggcctcattcaatcagttgacggcctgagtaggctcaaaatcctgaccctctcttgggtaaaagggaactcctcctgcctgactgcctttgagttgggacattggttttttccctgccttcaaacttgaacaaaagtatcaacttttcctgggtctcaagcctgctggcctttagtctcggactggaatgacaccatcagctctcctgggtctccagcttgctgactgcagatcttggaatttattaggatcaataattgcataagccagttccttatactaaatctttttctacatatgtatacagcctattagttctgtgtctctggagaaccctaatacactgctttaagtaatcagaactgaaaaataatcattttaaagaagtgatggctgcccttctcataggaattaactggcgatcttgctaaatgcaggtcctgattcggcaggtccgaggtgcggcctgagaatctgcatttctaaccagcttcaaggtgatgtcaatggtgctggccagtggaccagcccttgagtaacaagggcttacagatcagtagtcatggacaagtttactctactttgtgtagcctctgtcccagataatgcttcctctggactcctatctagaaacacttaatcttgagtcatcagtacttttaatcttggtaattttatatttggttgtattaattcatcaattcaaattttaagacttctatgaatcaaaatagaatacagtgtttaaaaagagctctactaaaatctcaggcttgtgcaagacgccctgtttccagacttttcttcaattccccaatccctagaaatgtcactctgaccattttcattttttgctctttgactatacggttttttgtgactgataacaatctgggcatcaatttgcctcttctctcattgttaataaaaaagtaatccatgctagtgattttgtgtcatttctaatgtacgggaaattagaaataaatgaatgaggtgcacagtgtagttcagataaaattctcaggttgaaaaaacatgcttatggaaaataaatgaataaatatgatttgggctggatagggtggtggaagatcaatcacgagctcacagctggctgagatgggaccccagagttaacaagccagacgtgagatgctcgctgctctgatttctcatcacagaaacctaagggaacagccacaggcaggaactgacctgccccttccccagtcctggatacactcccacccctgatatttgtagggattagggaaaggatacaaatggaggtccttgaaccatttgtctaaatatttgaagttataaatcaaggtaaaaaaggtaaataaaatgttttatcttgtgtcatgacacatatatctctatgatcacctatgagaccaggttcaatgtcagaattcttgaattccttggatttctgggccagaacttggtggtaccaagatagtgacccattgcctgtggctcatgcctactcactttctcttctacttccacccctagctacattctgtaccaagagggacctttttcccatgggtctggctaccccgccctgtggtccaaagcccttcaagcagcatcccttggctactcctctagtttaggggagtgtacacctcgggtatggtctgccccttgggaggatggccccagacatgaggcccccaaaacccactccatctagaaacacttaatcttaggtcatcagtacttttagtcttagtaattttatatttggtcatactaatgagtcaattcaatattttgatacttttatgaatcaaaatagaataaggcttttaagaaagggctctactaaaattctcaggcttctgcaagatgccctttctccagaccttttcaccattcttttatacccagaagtctcattctgttcatcttcattctttgctctttgacctgctccaccacgggatcaggtggagcaacaaggaagggaatgtctatattatctgtattagtttgttcttgcactgctataaagaaatacctgagactgggtaatttataaagacaagagtgtgaattggctcacagttctgcaggctgtacaggaagcatagcagcttctgcttctggggaggcctcaggaagcttccgatcatggtggaaggcaaaggggaagcagacacgtcttacatggccagagcctgagaaaaagggtggggggaggtgctacacacttttaaacaacaagatcttgtgagaactcactcactgtgcagtactagcggggaatggtgctaaaccattcatgagaactctgtccccgtgatccaatcacctgtaaccagtccccatattcaacactggggattacaattcaacatgagatttggtggggacacaaattcaaaccgtatcatcattagaatgagtcacgatgaagtaagacacctccaaggatctgggctgcaacatcaattctcctgggacatcccacagaccttgctctgtgtggtaggatctgcgctgtgagctatgtctggtctgttgggcaaaatccatacatggctttttgatttactgtgctaacattggcaattagctcctcagagaaatcactgccaaatttctgtgtcatggataacagtgcgaagggggcaggagccttccctgtaatttgatgcattttctgttggagggaagcacaaccgagtgcaggcttctgcagtggctgatggcttaattgccacgtgcatcttgtggggagtacttacttggtgtccctatgcttgactccctggcactgggaagcagctgacacctggagggagggtaggaagccaaagggctggtggctgacacccaacagtgaaggagctggaatcaccgttctctcactcccatttaaatcacttcattgttaagggccatgcagtctgatgacattttagtcaccagaaactgttccttaattattcagatactgtatgcccagtatgcagtgcattgcctggcatagatcagggtctcagcagtgtctaccaaggtcaccctagctctgggctggctctttgtgaatggctgcatgacattcctagtccactttctcctctccttctcctcacacttccctctttggtggattgtttaattggtcagcaattactccttctgcccttcccatctatggtggagtgaacttccctttcccccttattttgggcttgggcttgtgatttactttggccaatggcacatgaacagaaaagatgcaagcagaggttttaagtgtgcctggtgtcttgcttggcctcctcggccctctcctctgtcatgagaagaacacgtctcagatagctgctggctccagaagaaggagacttacggagcaggcttgaatcccacacatagcctggaggtaagcccagctgaaccccgccacactctgtcaaatccaacagagttagctgggtgcagtgggtcacgcctgtaataccaacactttggaaagccaaggcagacagattgcttgagctcaggagtttaagaccaacttgggcaacatagtgagacctcatctctgttacaaaaaaaaaaaaaaaaaaaaaaaatcacacaattagctaggtgggggcggtgcatgcctgtgattccaggcactcaggaagctgaggtgggagggttgcttgagcccaggaggttgaggctgaaccactgctctccagcctgggtgatagagtgagacattgtctcaaaataaaaaaataaaaccaacacacagagttatagtcaaccttctgatctgtgagagagaattaaatatgtattgctataagctgctgagattttagagttgtttgttacacagcattattaaagtaataaactggttaacacactctcccatgctggacactaatacctggttcagagcagtagcagagatgtctttgataatcgcgaagaccagaaagagagaagaactgagaagatcccattatatctcatacattttccagcattaccatattccttttgttttatattaatatcccattagtgaacacatctcattctatccccacaagtggttttactccatcctcttctattaggcctcttttttttattattattatactttaagttttagggtacatgtgcacattgtgcaggttagttacatatgtatacatgtgccatgctggtgcactgcacccactaactcgtcatctagcattaggtatatctcccaatgctatccctcccccctccccccaccccacaacagtccccagagtgtgatattccccttcctgtgtccatgtgatctcattgttcaattcccacctgtgagtgagaatatgcagtgtttggttttttattcttgcgatagtttactgagaatgatgttttccaatttcatccatgtccctacaaaggacatgaactcatcattttttatggctgcatagtattccatggtgtatatgtgccacattttcttaatccagtctattattgttggacatttgggttggttccaagtctttgctattgtgaataatgccgcaataaacatacgtgtgcatgtgtctttatagcagcatgatttatagtcctttgggtatatacccagtaatgggatggctgggtcaaatggtatttccagttctagatccctgaggaatcgccacactgacttccacaagggttgaactagtttacagtcccaccaacagtgtaaaagtattcctatttctccacatcctctcccgcacctgttgtttcctgactttttaatgattgccattctaactggtgtgagatggtatctcattgtggttttgatttgcatttctctgatggccagtgatgatgagcattttttcatgtgttttctggctgcataaatgtcttcttttgagaagtgtctgttcatgtccttcgcccactttttgatggggttgtttgtttttttcttgtaaatttgttcgagttcattgtagatctggatattagccctttgtcagatgagtaggttgtgaaaattttctcccatgttgtaggttgcctgttcactctgatggtagtttcttttgctgtgcagaagctctttagtttaattagatcccatttgtcaattttgtcttttgttgccattgcttttggtgttttagacatgaagtccttgcccgtgcctatgtcctgaatggtaatgcctaggttttcttctagggtttttatggttttaggtctaacatttaagtctttaatccatcttgaattgatttttgtataaggtgtaaggaagggatccagtttcagctttctccatatggctagccagttttcccagcaccatttattaaatagggaatcctttccccattgcttgtttttctcaggtttgtcaaagatcagatagttgtagataagcggcgttatttctgagggctctgttctgttccattgatctatatctctgttttggtaccagtaccatgctgttttggttactgtagccttgtagtatagtttgaagtcaggtagtgtgatgcctccagctttgttcttttggcttaggattgacttggcgatgcgggctcttttttggttccatgtgaactttaaagtagttttttccaattctgtgaagaaagtcattggtagcttgatggggatggcattgaatctgtaaattaccttaggcagtatggccattttcacgatattgattcttcctacccatgagcatggaatgttcttccatttgtttgtatcctcttttatttccttgagcagtggtttgtagttctccttgaagaggtccttcacatcccttgtaagttggattcctaggtattttattctctttgaagcaattgtgaatgggagttcactcatgatttggctctctgtttgtctgttgctggtgtataagaatgcttgtgatttttgtacatttattttgtatcctgagactttgctgaagttgcttatcagcttaaggaaattttgggctgagacaatggggttttctagatatacaatcatgtcatctgcaaacagggacaatttgacttcctcttttcctaattgaatacccgaaaaggtgactttgaattccagcttatatagcatcttcaacaaggaatagtcaatttttagggaagagacaagacaaaagaaagactttaagtctctaggagctgcaaattgtagaaaggcaaacaaatagcagataaaggccagttggtaaagcttgttagtgtagattcctatggtaccatctccagaccagtaagtgtctaaagttgtcttcagcggttaacctcgttttccctggtaaagagggggtgagtggtgaagtatcttctgtctttgtaaatctatatctggctttaggaaactagaggaaggccggagagctttcgtttatctgcttcttctttttttttttttgagatggagtctcgctctgtcacccaggctggagtgcagtggcgcgatctcggctcactacaacctccgcctcctgggctcagatgattctcctgcctcagcctactgagtagctgggagtacaggtgtgtgccaccatgcctggctaatttctgtgtgtgtttttagtagagatggggtttcaccatgtcggttaggctggtctcaaactcctgacatcaggtgatctgctcgtcttggcttcccaaagtgctgggattacaggcatgagccacagtgcctggccttatctgcttcttcttaattgcctgcagctcaacaattcttatgcaaaataggcacattttagagtgacatattctagttttccacagggggaggaatagacctaatggaccaagccagaattccgtttagcagacaaaagcagggagaagctggaacattctgtcattaatattgaaatctgccaaaattataacatccaaaacatagtaggaagctcaaaaaggatctgttgaatgaataaatgatctagtgaatcagggaatggctctggttccaacccctcatttctggatgaggcccagagaagtgaagggactcatccaaagtctccccgggttagtggccaagttagaacagcagccctgtctcctgatacaggatctttccaccatggttcactctgagctgttaagaactgtttcccatagatgcagtgtgaacacacaatttattattcagtcctgggtgcttttaagagagaaagagaatgctattaataattgtgtcagatacagaccaatgcaatagaatagagaatccagaaataaagccaaaatacgtacagccaaccagtcttcaacaaagcatgcaaaaacacaaattgagaggaatagacatactatttatttttattttattttattttttattttttctgggatggagtttcactcttgttgcccaggctggagtgcaatggggtgatcttggctcaccgcaaactctgcctcctgggttcaagtgattctcctgcctcagcctcccgactagctgggattacaggcatgtaccaccatgcccagctaattttgtatttttagtagagatggggtttctccatgttggtcaggctggtctcgaactcctgacctcaggtgaccccccgccttggcctcccaaagtgctgggattacaggcatgagacaccgcgcccagcctggacatgctatttagtaaatggtgtggaaaaattggcaagccacatgtagaagaataaaactgagtccttatctgtcaccttatacaaaaatcaactcaagatggatcaaagacttaaatacaagacctgacactaaaaattctagaagagaacattgggaaaacttttccagacatcaacctaggcaaagaattcatgactaagaccccaaaagcaaatgcaacaagaagaaaaataaacagatgggacctgattaaactaaaaagtatctgcacagcaaaagaaataatcagcagagtaaacagacaacccatagaatgggagaaaatattgacaaactatgcatctgacaaaggactagtatccagaatctacaaggaactcaaatcagcaagaaaaaaaaaaatcccattaaaaaatagacaaaggccatgaatagacatttctcaaaagaagatacacagatggtcaaccaacatgaaaaaatgctcagcatcactaatcatcaaagaaatgcaaattaaacccacaatgagatatcaacttactcctgcaagaatggccattattaaaaagtcaaaaaacaatagatgttagagtggctgtgaggaaaaaggaatgcttatacactgctagcaggaatgtaaattagtacaacctctatggaaaacagtgtagaaattcctcaaagagctaaaaagtagatctaccgttagatccagtgacaccactactggatatgtacccaaaggaaaagaagttattatagaggaagacactggtacatgtacttttgtagcagtacaattcacaattgcaaagctgtggaaccaacctaagcccccatcaattaatgaatggataaagaaaatgtggcatatatacaccctggaatactactcagtcatcaaaaaggaatgaaatatgtcttttgcagcaacttgaatggagctggataccattattctaagtaaagtaacacaggagtggaaaaccaaaaaacatatgttctcacttataactgggagctaagctacgagtacataaaggcatacagagtgatataatggactttagagactcagaagctggagggtggaaggagggactagggattaaaaaaacaacctacacattaggtacaatgtacactatttgggtgatgggggcactaaaatctcagaattcaccactacgtaattcattcatgtaacaaaataaccatttgtaccccaaaagctattgaaataaaaaattttttaaaaattgtaccagagcaacaggtgaaaactagcactgctgtgggcaaattggaatgtgtgatcaccctatttgtaagtcttggcttattggacagtgttatgggctgaattgtgactcccccaaatccttatgtatgttgaaacaccaatctcagtaactcagaatatgactgtatttagaggcaggaccttcaaagaggtaattaagttaaaacaagggtgttagagctgaccctaatcaaacctgactgacatctttataagatgaggacattcaggacagggtgtggtggctcatacctgtaatcccagcactttgggaggccaaggtgggtgaattgcttgagctcagcctgggcaaaatggcaaaaccccatctctataaaaaatacaaaaattagctgagcatgctggcccatactgtggtcccagctactcaggaggctgaagtgggaggattgcttgtgtgtgggaggtcaaagctgcaagggagccatgatcacacctctgcactacagcttgggtgacacagctagaccctgtttcaaaaaataagtaaacaaataaaagaagagggcatttagacacacagagagacatcagaaacatacataaaaggacgaccatatgaagacacagcaagaaggcagccatctgcaagccaaggagggagaccccagagaaaccaaacctgctgacaccttgatcatggacttccagcctccagaactgtgaggaaacagatttctgttgtttaagccacccagtctttggcattttgtcgtggcagccgagcaaactaatacagacggcaaatgacagtttgaaaacagaggtcctgtcttaacttctttcatgctctccagaacatggaagaacggttgctgagtaccacactgcatcatgctgagaagaatcctgcacacaggatgggtagatctggattgtgtcaacctaacctagctggaagtaggttttccagaattaccttccttgcacatgtgtaagtgagcatggccacaggagatgtgctgagagatttggaagatggaagtgaaatggcagccatattcccagtactcttaggggatcagtgtgctgttgctgcttgtgcatggcatcactcacctgctggcttacctgtccataagctcagcctcctggttgtggctgctgcagctcctgctgggtcacccctcagcatctctgactcccagaccagctgcatgtgcagctgtttggcaatggacctcagtttctcaggttgggcccctcatcatggaaggtggaggtttagggcagtgggagagcaaggggtcagtagggctctgttctttctagtggctgtaaaagataatccattttctcacattttccagcctctggatgctgcctgcattccttggctcttcactccattttcaaagtgtgttactccagtctctgattctgtcatcacatctcctctgactctcttgcctcccccttttccttggtcctataaagttcccacaaggacccttgtgattacatgggacctacccagataacccaagataatctccccatctccagatccttaatttaatgacatttgcaaagtcccttttgccaagtaagataacatactcacaggttccagggactggggcatggaccacttgcgggggtaagtattctgcttaccatgataatttaaactctggtcttcttgactccgaaagccatgcttatccaaggacatacaccctgctcctgcagcctacatttaaagcatgggacacatgtacacagaaagcattccttaggtacaactgacataccaagcctcctttgagctatgcatgcaaactagtgatcatagcgacagtgataggtcagactttggtgtaccagccctaaggcctctgcatgtccttaagagttgaggggttttctctctggagaaggtgtctatatcagcaagggtcttgatatcccactcaaaaagatgattacaaccacttttctgaagctacctaagaaaggaaatgctttcacagtacactgagaactttgccataaacaatatttttcaaatcataataacataaatattgacaaataatttaaaagatggtattaatataactaccttgagaagaagggattgggggatatataaagttaactcctcacctggcataacagggagctaatagagtttaatgtggataaatcataaaattatgactcaattatgttattttttaaatgcgggaaacaaccagaagaaatgatgaaaagagttaaaagtaaatgtttctggggagcagaacttggaggcaggagactgtggttttttattataagcctttcgggatattttaatttaaagccagaccttaagaaaagtaagatccagatctattcttggtatagaattgtggaaatatgatgactggaaattggaaagatcatttgagagcttccttcccatcatttgcaacttgtttgcaaaagatgggaaaggaaaaaaagaagacaaatcccaaccttttattgtaatatgtagagactaaaatcgtatgtagatgaaaatccaaattttatttcccctgcaatccagactcagcacaaataaccaattaaacccaccttcaaaggcagacaaaaatcatatcactcttttatgcttctaccagcatttgaaccacctccatatagacataattagttagaaaaagtcaggttaatatttttgtcagtgtctctgtgtgtgtgtattcaataagtttgcaaatatatctttggctcctgttaaggagacccaaactataatcctgctaaatgtccaagtctcctgtttatgactatgtaaaatcggaggctacagatgccctaaataccctcctatgccaaaatatctccaccatcacccctgcctaggctgtcagttcccaaactggaatttcccgcctcactcatttctctgggttaaagtccagcctccaggaaggcccaagtaaaataccagattaatctgaaaaggaccaacttgttaataactcactaaccccttgacatgcattcattcatctcttacagagagttgggtcctaaagaatgggacagtagaaagatgggttttcctagagagggtctgaagtatgggaaagagtaggggtaggggtcatggaatcatcttggatgaggatggaaaggcagcatggggctctgggagatggtttgagtggcaaagagaaaggaaagtgttttccttggtcagcaatccatggtggcactgcccaacacaacacagactgcaccctggagatgggcagcatggcactgggggttgcaaatggatgtcagtcttgcctgtgttactggggaaatgaagagtcaaatgaactaaagcagtggtccccaatctttttggcaccagggactgattttgtggaagacagtttttccatggactgggatgggggcagggatgggggtaggagggatggtttggggatgaaattgttccacctccgatcatcaggcattagttaggttatcataaggagcgtgcaacctagatcccttgcatgctcagttcaccatagggtttgtgcttctgtgagaatctaatgctgctgctgatctgacaggaggaggagctcaggtggtaatgcttgctcgcccaccactcacatcctgctgtgtggcccagttcctaacaggctacagaccagtactggtccacagcatgggggttggggacccctgaactaaaggactggaaaccactttgataggtacaacgtaggtaaaatagaagcctccatgacccactgtggtttcctgaaatgttggtttttcattcaaatgctttggcagccacagagtgtggagtgttaatagtttatctataactggctatcagaagacaaatggagtaggacacagggctgagatgaaaggtaaagagacattaacaggagctctcccctacaacttccagtgaaacacacctatggagaaaaatgttgggatgtatctatatcaccatctatttagaagctacagaaagctcttatggacaaaggcctgctcatccttaaagacttcccttgaaaagtcttttcagatgttcctagataaagtatcctcccatagccccttagtcatatttcagaacagcatttgtcacttggtcttgtaatgatgagttaatacacttgtttataccatccaactgtgaactcctagactgaggaatatctttggactgaggacatatccccacatgggagcactggggagaatacgtaggcatttcccattgagcactttttgaaataagtaaataaaagggtcacagaaaattgaagcccttgtgatcttttaatttcctcaaaagcataacttaataaatgtgcaaaatgcacaaacttgcttgcatgatcaacccttggcctccctcctcaagtgtcaagggaacaaaaagataagaggtatcatatttaagaaagataatgccatcttctatccatccaagggaggttcagtaacttctatggccattaaatgctggaagattgatgtgggcatgctctgcttggctcctacctcttcttctggaagctggctgcatctgggagtacacattctctgcctctcctccagggatgagctcctggttagcactgcctgagagaggggatcaagtctgtccaattctgaggtcctattaagcaggcccatgtagttcttgcactaaactacacgctccatcttagtaatatttggtaatattttggtctcctccttctgttcctttttcttattaagcaacagtgagatatgatggtttttaaattaattggatgatatatttaaaagctataaaatgctaatatttgacctgttgtttgacctggttgttctatggagctttatcaagggaaaagagagcccaaagagatttcttggctccagtagagaatctaagattatcagggatttataaagatgtagtaggctaggtatggtggctcaaacctgtaatcccagcactttgggaggccgaggtgggtggatcacctgaggtcaggagttcaagaccagcctggccaacagggtgaaaccctgtctctactaaaaatacaaaaattagctgggcgtggtggcaggtgcctgtaattccagctactcaggagactgaggcaggaaaatcgcttgaacctgggaggtggaggttgcagtgagccaagatcatgccactgcactccagcctaggtgacagagggagactctgtctcaaaaacaaacaaacaaacaaacaaaaagatggagtaagtaaaccatggttcaatcacctgtgaccttagaaggccttttcacggatagttatgaaccatggtgactacccatgatcccttcatgatgacgagcattgggatgaccgtggtaatttgatggatagctgcccttcttttatttagaggtcactataggtcaggccacatgctgagtgttttacatgcaatatcccatttattctaacaagcctgtgaaataagtatttatcctatgttacaaatgagcaatccaaagaaatcagctcaaatgacagaaatcagattatttgacaaagatcacacagttggtaatggctcagaaggaacttgaacctaggtctcctagcttcaaatctcctctcagagttgtgactttaggaggccttcactagaatcaaggcacgcactacagtccacagtctctgtgcagggtgactaatgcgaatggacctaagaccatgtctgtctccatactgtctgtgggaagtggcaaagatgcatttgtgagtagtgaatgaatggagcttttcttttggttttcagctcactccatatcccctaaaaccgtaacactcatggataccatagtctgtaaaatcaaacgaaaattacttacaagcactggtaaaatctaagcagtggagtgccagtaaatatttaacaattggttctctgaaacaaaaaaaaaaagccataatatgtagcacctgccaattttcatgctgtaaatacttccagcatggccagtttcaagctaccaacctgacaactctgaacatggagttgagaagagacgtattgaactggttctttctagctggtaggagcctgctccagcacaccactgagtctaagcaaccctgtaaagtcaaatttgggggaaggagatgagaactaagcctcttcttattaatctgaactggaaaatgtgtcttacattcatttgtgtttttctttattgtgtacatttatttcatttcacatgtgccatcacagagctaaagtacagttccacaaaagctgtgctgggaggatgcaaaagtcatcaagaacatggtccctaccttatacatactcagccccctctagagtcacatacctgaactcactaaacttcatagcaaccccgtaaggtgagagagacagaatagtgagtattaggccaggcacagtggctcatgcctgtaatctcggcactttggggggctgaggtgggcagatcacctgaggtcaggagtttgagacctgcctggctaacatggtgaaatcccatctctactaaaaaatacaaaaattagctgggcatggtggcaggtgagtgtactcccagctactcaggaggctgaggcaggagaagagcttgagcctcggaggtgaaggttgcagtgagcagagatcccaccactgcactctagcctgggtgacagagtaagatcctgtctcaaaaaaaaaaaaaaaaagaatagtgaatgttttagagatgaggataccaggataagggagactatgtcttgaacctgcctctttctcccagtcagggactgtcatttgccactcatcactcctcattggggaataattgtagggtaaggtcaatgcgggttcctaaattcgagtgtctcagggttctgtttaatacttgctcttctctttatatagcagtttaatagcaggttgtagtctttgaaattcctttggcctccatacccaaagaatgatttccctttttctatagatcaagttctgtctcctttcaatagtatcttttcagtagaaagaatgcaatagttccacagttgctactctacttggtaaatgcggtggaggccgaacaaaaactgggttggggaaaaaaaaagttaggttgagaaccaccaaagttgattcttttctcccgtgagatttactgaaaattcaggtgaattacctttgtgtgactaaaagggacttagggaaaaatagctgagtttccattaaccaaattccctggaaccaaaggaaaattgtgcactttgttgcacattaaaaataggaactgcaagtattaaaagagcaaagtatcacatttaataatcacgaggtgaggcttaatgataaactactatatctacatatgcacatcatatacttgcaaaacataacagactattagagcaaaacttaaggaactatgaatgctaattagctagtttatctaaaatgtctacctgttcttaattacctttttttttttttttcctaagaagtaagcttgaatctggccttacttttttttttttttttttttttgtgtgtgtgagacagagtctggctctgtcacccaggctggagtgcaatggtacgatctcaactcactgcaccctctgcctcccgggttcaagtgattctcctgcctaagcctcccaagtagctgggattacaggcatgcaccaccatgcctggctaatttttgtatttttagtagaggcatggtttcaccatgttggccaggctggtctcgaactcctgacctcaggtgattggcccgcctcggcctcccaaagtgctagaattgcaggtgtgagccaccgcgcccagcctcttaattacttcttaatcaacctggctttctctgagttctcagaggaatgggacattcaaatttaccttaaactctttgaaacaaaaaccatgagaacataaacccaatacaaatgctttcaagctacagaatatcaaaagccatttttattgaattctatttagtgatcttctcctcagtttttttctttttcaaagcctgtttccaacataattagagagaagacatgatgctaagatttctagtttgttctcaaaaatgccccttcttactttcttgatgcttttttgcatggcagagagaaaagggccatgttgttgtagggtccctatgatatgagtagaaacattttacttattgttagaaagctgtggttaccttggcagggagtagctaccttgctcaggaagctccccctggttgcgtctccgggaatcagccctcagttaaccaggcagttcaccatttattgtatttatggcttaaactttatcccttcttttaaagggattcttttaaagaagtatttatcccttctttttgagggatctggaataaaacagtctaacccattctagaatctactttaaatttcttttatttaccaagagggaaagaaataatctcaggttgtttgcagatcaaaaatgtagaactgttagaagaaaggtgctgggaaaattagcaatgaagtgagaaaatggtttaaaagagacaactgcacagcagctggtcctccaatgtgtgttttgctgatgaaaatctttctgaggggctgtactggaacaaacccatattaggaaatcccaattctgtctacagctaagacatacacgaagtcagtagcacctcagggtttgttttttttttttcttgaatatttctctttgctgtctctgtaactgaatatgttagaaaattactcatattttccttcagcttccacaaagaaatttaggttaagcaagaggagaaaagcaatttctaatttgtttatgggtctgcaagttctgcagaatctgaggagagaaggataaacttactggtaaataattcaccttcccacctctcaaatagtttttctcaaatagaaacactccaggcacacacaaaagttctccatttcggggagcagcccaaacagtgtctcctccttaactggcaaactttgccctagaagctccttcacctccaccccagagagcttcaggggaaccagggctagtccactccaacgcctgtccctacctgcccgcttgttcctaatgacctcagtcctctgtcgcagagctctccagctaccaggaagaaaacagacactattctctgccaccaactccccatcccagccagcctcccagcacacaagagcctctgcaaagaaacgatagtgcaagcacattttcttatggaactatcctggatccctccactgtcccatgcctcaggattctctcatccaagcaccctatttcccttcccaacgtagagccacgccctcatcattttcaacatttattttttggagacagataggcgtgttcttggttattcaacaactccacgatcaatgtggtactttatttaatacgtctgatttcactaatgcacaaacaaccttgcctgagtctggtatgatcattctcatcttataaatggagaagctgagactgggagtttccaagacaccccagctcacagtcactggcaagggccgtccccaaatctgagccttccgcgcagcccaggctgctcccagctgcaccatgttccgggtgcaacgagagaagggtcagaagtgagcgggcagaggacgccctcccctgctggctgctggtggcactaggggctcctggcaacgacgcctgtcagggacgcctttccagacgcatcaaacccagctttcagacgctgaaggtgacatcctgtgagggcgacagcagcagttattggaaaggggccgggtgaagtcctgaagtactgactgcttaggctccacgcaccatgctgggtagaccctttcttcaaggcagcttctgagttggacatgcccattttgcagatgggagatgaaggcttctgaatgttaactaacccgctaagctgaagagccaggaggatttggaccccgggctgccttcacaagcccaccttctgctggtccacctcctcatcccaggatctaaggaacctgagggaaacaagagccctgtattagtaaaggtttcccagagaataaatagttatagatcaatagctatgagatttattataggaattggctcatgtggttatggagactgagaagtactcccatctgctggctgcaagctggagaaccagaaaagccagtggtgtaatttggttcaagtccaacagagtgagaatcggactagccttggggggacagggggtgggggagcctgtgtaagtcccaggatttgaaggcctgagaagcagggcacagatgtccaaggagaagatggatgtcccagctcaagtagagggagtgaattcatccttcctccacctttttattctattcgggccctcagtggattggacggtgcccacccacacgggtgagagcagatcttcacccaatccactgagtccaattccaacctctaggggacagcctcacagacacacctaggaatcatgttccacccactgtgtgagtatcccttagcctagtcaggttgacacataaatttagccaccactagccctctgtacaaggccactgccccactccctgggctggcttctgatgctgcctgcaggccaaagcaccaagatcttggctagggtccccatcctgtaagccatgcaaggacattccttccctcctgtctaaagcccttcacccttctaaccactccgctctggtggccaacgctttgagggggtagcagagaaagctgtgtattcaaacccctgaaagaggatgtcctaagtttgtcttggatggaactaaaccatcccacatccataactgtgggatccctgccatcccggaattatcttatattcacaactccgacttaaggcacaaacagaagctactgtctgacacgttggcccttggctggtacacacagagttgaaccatctgttgggcagtttgcccaaggcttgtcttgcttttggcagcccatatttatctacaatgggtctctctgatatgagggtagactttgctggaggccagggtaacagagcataggaattaggcatgtgtctccttccttgattttccaagatgcctttagaggatcctcaacctgctgacacttgctgactagtaaagcccttcccttttctacaattgtacttacgaatatcagataaaggcaggaaaggttgggaacatgcaaaagagcccctagcagctgtgtggggaagcggacagctcccctgtggggcctgtgatggtgcattggtatcacggtcttgtgtgcaaagaggccgggactgttcttcccacttgctggatcaaagaggtggcacaccttgttgaaggtaaaaagagccaaaggcttagaaggaacttccatgagactctccctctcctctattggtgctcacttagctgagaatatgtacaacgatatcctggcctgggacaaaacagagcaggtgctaagaggatcacggctgtcacctgatatcattgaaatgtttggggcagggggtcctccctccgggccttgccaggtacccctctactgtgctgctccatctcactcctgctgactcgtccaccatgggacaatccagaaaagcatgagaaaagcacttggcacttcttgtgtgggaagacatcacagtggccgcatcccccatgagtgttcctatcttctgtgccagggctgcagagaacacaagctgtggctgcggcactcactgcctactctgcctcctccattcacatcttcacacagatgccaactgtctgccaaagggaataaaaaataaaagcagagtgaacttgacatcctataccttccagcattatccctctgaacaaagtagaaatggtgcaacagctgaagaaaaggactcagagaggagagaacggaagaatgatgagatgtgatgagttagtgaagtcaggccccaggaaattccacaccagcagcatcaatctgccttctgtacccaatgctgagggatcaaaacttggagcccagggctggagcctcaggattcctccccaaatcacactggcatgactgtgtgcaaccccggagttgggctcatgtttcttctggaattgtagaatataaggcacaatttattctatcctttcatcttcctgctttaagtttagaaattgctggtggctttcccttaaagggagtacatttaaattttttgtattaagttcttaagtttcttaaggcaaaatattgatggtaccatcaccatcttcgtctgaaagtcatgttcacattatagaaaagactttcgctagactgagtcttcctcagtcaaagattatatcttgaaagtgtatactaggttaagcaacacttttgaaatgttatcatactttaatcagaatttcacacacaacacattaagagtagccaacagtgaggtcaatgtccttattttcaaaaaagcatttttctccagtttatttttatgaaaggtcagtgccttggacataatgttcacttccattcaagaacatttcttgataagtagaaataatttttcaggcaaaaacctgatgttctaagttcaataataacctgtttctacactatgccaaattctggtgtgaagggaatttttactgacatggtaattttttcacacattttatgatttttaaaaaatagccaggtgtggtagctaacacctgtaatcctagcactttgggaggctgaggcgtgtggattgcgtcagcccaagggtttaagaacatcctgggcaacaaagtgagaccccgtctctattaaaaaaaatcataggatatccaatagtcaacagttctctggtttcaaatttctgccagaaaaataatctacaaatcaacttgtctaaagcaaaagtccttattcataatagctgccatcaatttctaactattatgttgctgataacagcatatagcaagtcagtcaactcagttattgggaatattttcagctgttaatgttggtatgtgtgcagcatagggttaagactgtgggtatagaattcacacttcccaagttcaaatctttgtttattgtttactaactgtccaaacttgggcaatcgactaaactgcaatttcttcatctttaaaatggagacagcatattcctcctagagttattgtaaggattaaacaggcaggtaagagctaaggtgattattgcaatgctgaaaaaaccttatcagtttctcttattatatttctcaaactgtgtagatcatgcttggagaataaagtgtttaagttggtcaattgaaaatcttttcggaaaattaaatacctttgctgttaataagtcaaatcaatgttaataatattcttctgtgtatgtccatagccttgaattgtaatccagcctatagcccgtatcattttgtttgagtttttaacaatagactgaattgttaaagaacagttttagagtttcagaagagttgagaaaacagtagagttcccatatgcctgtaccgagtttcccccatggctatcatcttaaatttctgtggtacatttgttacaattaatgaaccaatattgatacgttattattattagctaatgtccatgctttactcagatttccttatttttacctaatgtcctatttaggtgttagaatcccatccagaatatcacataacacttggtcaccatgttcccttaggctcctcttggatgtgacagtttctcagactttcctttttttatgaccttaataattttgaggtatattggtcaagtagtttgtaggatgcccgtctattggaattttacacttttctcatgattaggctggtttcttgaggaggaggaccccaaaggtaacgtgccattttcatcacatatcaagggaacatactaacaacatgacctttcactgttgatgttgaccttgatggctgaagacgtgtttgtcagatttctccacggcaaggttacccttcaccccgtccctttaccacactgtgttctctgtaaggaagtcactatgagcagcccacacttaggagtgaaaatttatgcccccctccttgagagcacagtatctacatcaattatttggaattcttcaacatgggatatttgcctcatcttctctatttatttatttattcagtaatttatttatacaagtatagtttgttttataatccaccatcattttatttattttgttgttcaagctgtgttcctagtgtaaagaaaagataaatatttaaggtgatggtatctgattatcctgatttgattatatggatgtatcaaattatcacacgtacccccaaaatatgtatatctaatatgtgtcaattaaataatcattccagttttgtcattgggagctctttcacacacacagagctcttctgcggtccttttgacatattcccatcaatgctttttaaaacaacaacaacaaaaacaacacttccttactttcaagcactacaagatgctccaatttcatcttgtatattttctaccccagtccttgatagcaatttctccaagcagccttgcttccttttactgaagaatggcatcaaaaacagatctgggagctaggtgtgctagtggctactgggtgttgtttcattcaggtactttcacctcacaaagcaaggaaatatatgaatgtatactcacctgtatataaaacatatctataaatatttctatgtgtaaccatttacatttatattaagctagacatgagttcctactgatctctccaactgtaatcctttaccacatggatcattctattctcctgattcccttgcttatctgtaaagtttcaccccaaaagagagaaatcttgttcccaacacttgccattcatttactcaattatttaattcctctctctctctctctctctctctctctctctctctctatatatatatatatatatatatatatatatatatatatatgagtatcagaattattgacccatgggaagcaatattatcaactacagtacagtgcttaaattcagttcttttcacctttagtattacacactaaaacatttccaaagttactgaggtcagcatctttctgcctcccctcatttcaatggggttgaacattatcatttttaaccaataaacaaacaactggatgttatatcaacacaaaaggaacttcatgttcacacgtctatacaaacaaacatttcacttgtttaaaaaaaagtaagttagttatagaataaaagataaaatattaacattttatataagatctgatgtaaattgtcatcaacaaagtgttcatatcccacatattttatcaagcttgtcaaatattgttcatgcaaactatcaactgtaattcaccttggcttttgctaattgcaaaaatgttctggccgggcttggtggctcacgcctgtaatcccagcactttgggaggctgaggcaggtggattgcctgaggtaaggagttcaagaccagcctggccaacatggtgaaaccccatctctactaaaaatacaaaaattaactgggtgcagtggcagatgcctgtaatcccaccttcttgggaggctgaggcaggagaattgcttgaacctgggaggcagatgttgcagtgagctgagattatgccattgcactctagcctgggtgacagagcaagactctgtctcaaaagaaaagaaaaaaagttatcctttctgaccactgcttttaaatctccactttattttttcctgggaaataaactttaggcacttgaaccacagcaagccttgacctcagcctggaataaaccacactaatttgttgaaccccaggctgaatcctcttttctgtgtaggtgtattgctttttaaatttacaaatgaaactaatagtttcctaccttgccacccatatcaatatgtttatatcatctatacttacatatttatatctatatccattctttttaaattttaagttctggggtacacatgcaggatgtgcagttttttacataggtaaatgtgtgccatggtggtttgctgtaccaatcaacctatcacctaggtattgagcccagctgcatcagctatttttcccaatgctctcccttcccacacctaaccccccgacaggcccctgtgtgtgttgttcccctccctgtgtccctgtgttctcattgttcagctcccacttataagtgagaacatacggtgttcgattttctgttcctgcattagtttgctgagggtaatggcttccagctccacccatatccctgcaaaggacatgatttcattcctttttatggctttatagtattccatggtatatgcataccagattttctttatccagtctatcattgatgggcatttgggttgattccatgtctttgctattgtgaatagttctgctatgaacatatgtgtgcatgtatctttgtaacagaattatttatattcctttggttatatatccagcaatgggattgctgggtcaaatggtatttctggttctaggtctttgaagaatcaccacactgtctcccacaatggttgaactaatttacattcccaccaacagtgtaaaagcgttcctatttctccacagccttgccatcatctgttgtttcttgactttttaatacaaaccattctgactggcatgagatgatatctcattgtggttttgatctgcatttctctaatgatcagtgatgttgagctttttttcatgtttgttggctgcatgaatgtattcttttgagaagtgtctttttcatatactttgcccactttttaatggagttgtttgtttttttcttgtaaatgtgtttaagttccttgtagactctggatattagacttctgtgagataaatacaatacaaaaattttctcccactctgtaggttgcctgtttgctctgataatagtttccttttttctttttttgtttttctgagatggggtctcaccctgttgcccaagctggagtacagtggtggaatcttggctccctgcaacctctgcctcccaagttcaagtgattctcctgcctcagcctcccgagtagctgggattacaggtgtgcaccaccatgcccggctaattttttgtatctttaatagagacggggtttcaccacattggccaggctgatctcaaactcctgacctcatgatccacccacctcggcctcccaaagtgctgggattacaggtgtgagccaccgtgcccagcctctgatgatagtttcttttgctgtgcagaaactctttagtttaattaggtcccatttgtcaatttttgcttttgtggcaattacttttggtgatttcgtcatgaaatatttgcccatgcctattccctgaatagtactgcctagattttcttctagggtttttatagttttgggctttagatttaggtctttaatccaccttgagttaatttttgtataaggtgtaaggaaggggtccagcttcaattttctgcatataactagccagttctcccagcaccacttattaaatagggaatcctttccccattgcttgtttttgtcaggtttgtcaaagatcagatggttgtagatgtgcagccttatttctgagttctctattttcttccattggtctacgtgtttgtttttgtaccagtatcatgctattttggttattgttcccttgtagtatagtttgaagtctggagcatgatgtttgcagctttgttctttttccttaggattatcttggctatatgagatcttttttggttccatatgaattttaaaatagtttcttctaattctgtgaagaacatcaatggtagtttaatgggaatagcatttaatctataaattactttgggcagtatggccaatttcatgacattgattcttcctatccatgagcatggaatgtttttgcatttgtttgtgttctctctcatttccttgagtagtggttcatagctctccttgaagaggtccttcacttcccttgttagctgtattcctaggtattttattctctttgtagcaattgcgaatgggagttcattcatgatttggctctctacttgcctcttggtggtacataggaatgcttatgacttttgcacattgattttgtatcctgagactttgctaaagttgcttatcagcttaagaagctttggggctgagatgaagggattttctagatataggatcatgtcatctgcaaacaaagacaattttacttcctctaagagaaaagaatcaaatagacacaataaaaaatgataaaggggatatcaccactgaccccacagaaatacaaacaaccatcagagaatactataaacatctctatacaaataaacgggaaaatctagaagaaatggataaatttctggacacacacacccttccaagactgaaactgaaagaagttgaatccctgaatagacaaataacaagttccgaaattgaggcagtaataaatagcctaccaaccaaaaaaaagttcaggaccagatggatttacagctgaattctaccagaaatacaaaaaggagctgataccctttcttctgaaactattccaaataattgaaaaggagagactcctccctaactcattctatgaggccagcatcatcctgataccaaaatctggcagatataaaacaaaaaaagaaaacttcaggccaatatccctaatgaacattgatgtaagaattatcactaaaatactggcaaaccaaatacgcagaaaatcaaaaagcttatccaccacgatcaagttggcatcatccccgggatacaaggctggttcaatatatgcaaatcaattaacgtaattcatcacataaagatatctaaaaacaaaaaccaaattattatctcaatagacacagaaaagttcttcaataaaattcaaaatcccttcatgttaaaaaattctcaataaagtaggtactaaaggaagatactttaaaataataagagccatttctgacaaactgacagcaaatatcatactgaatgggccaaagctgaaaacattccccttgaaaactggcacaagacaaggatgctctctctcaccactcccatccaacacagtattggaagttctgaccggggcaataaggcaagcgaaagaaagaaagaaagggtattctatatccacttttactcaaattcttttaaacctcaaattgtaagagactactgtcaaagctaaaacaaaattatgttgggaatttatgccatatatcactgcaatgaggtcgaacttcaggaactgttagctcctaaccatttaaacaaagagagatattaaatatactgattttaatgtcatccctctgacttcctgaaccaacgactatttttcctgaaggcacacaaaattcaaaattaaataaaaaggtatttttgaaaataactcccacatttctgaaatgagaatggggcagcacagatgcacgttgacggctacctccatcgttgaaaagggagtttctgaggcagttctaatgaagtggcaattttgcagataatgtaaaattcaaaaacactatggagatgttaggcacaaacacgccaagcacataaagcagcatctggcagtttccctttggaggcctcgtgtgccagcatttcacttagataagaaaaaagtctcctattttcagcaatcttcttaaatgctttaatttgacactatctgaaagtgatacttaagttgtggtaaatcacatttaattgcagcagtctactgtctattatttcactattgcttcaatttctctctaagctctcaaagacctcatggaaaataaaatattccttaatggaagtgctttcattcttagtgactttttgcccatcttggtcaattattttgacatatgctaaagcagtaacagtcatattaaaaggccaagtaaagctgaaaagtacaactcatctctaagaacatttggctgtgtttctatattacctgcttaaagagtctaaatcttgtttttagccactctcccggttctctacctctaatgttggagtaatgagttcgtgaagtgcctactagccatgaggactaggggctcggggtacagataaagaagacacagaccctgccctccaggaggctgaaggaaagaagggcaggccaatcagtgctcctgagacagggtggccctccttctgagtcttctgtttactgagggcctttgtgctggatactgggctgctcctccatgttcattactatctgatatggtttggatctgtgtgtccacccaaatctcatgttcagttgtaatccccaatgttggaggtggggcctggtgggaggtgattggacataggggcactttctaatggtttggcaccatccttctagtgctgttctcatgacagacttctcatgagacctggttgtttacaagtgtgtagcaccctccctctctgtcttcctcctgctccagccatgtaagacaagcctgcttccccttctccatgcttccctttacaccatgattgtaagtttcctgaggcttccccagccatgtttcctgtacagcctgtggattcatggaccaattaaacatctttagaaattacctaggctcaggtatttctttatagcagtgtgaaaaaaaactaatacagtccctcctaacagtaatgccatgatgcaggaagagagccttacatttaggtaaggatgcttggtcctctgaacatgttggtcctttttataggtccatcgttcaggccaccttaaagaggcaacttgggtgttgtccatccaagcttggacatgggaattttgagaaataagactctgggctctggaggttctagttctctggttatcccatctgaagtccagctacctctggagaacagcaagtggatgtggatgaatttgttctcagtgattcctagagctgggtctgagtcttgggatgcaatggaagcctctttcctcttcattaggcccatttactgaagagcctgagtttcagaagagttagtggacttgctcaggtcttgacagatagttggaattgaaggctaagtttctccagaccacgacagaggttgccatggaggtgcagagaagataatgaaaatcatggtggtagatggaggtggaaggggtagttggtaaaacagagtaggcaccccagaaattatactaaatcattttttaaattatttttagtaattaatgcattcctccccctatatggccagagttcttagagttgggagaaatctttgaaattatttggatcattcctgcctcccaagactggcagagaggcactgaggctctccttcatcatctttagggataaagagctcatgcatgaatggggctgggggtccctggcaaattccgaccactggggaatctcttatcaaaatttacaaagaggaagcaggaagctccttgtttccagtgtatatcactcttaactaaagctcagagaaattaagatattctctatggcactactcaaaaccatgcaccatgatgagttggcaggatcagaagaaagaccttttgcggatgcctacctagaaggttgcagtggatactggaatttgggtttagaaagaaaaggacaaggggatgctacaaataatgtcaaattgaggctttcagtttgtgtgggtcaatattagcttgttgggaaacaagtgccaggtagtctgtgacattcaaggccctgatatcctaagagtaaggaagaaatagtgtttaacaatattcatcagagcagtggagtataagaaaagtccacatatgttctgtgagtcagcatgctgggactgaatttctaacctcctggttcttaatttcctcatctgtataatgagagacttgttgaagatcttgctaatattctacagtgggttttaatttttttacatacttggtgaaaaaaaaaacaaaacctcattttttcccctcaatctgatactagctggtctaagtctccatccttcaggttagaggagcactttccctcagtcatgttttctacgaatctctaggtgtcttgcagtctagaacattcaagtaaggattcctggtcctctgaacactttggtcccttttaaaggtccatggcgccggctaccttgaagaggcaacttggatgttctccagacaaacttggacatgggaatgttcagaaaaatgggagtttgcgctctgggggtcctggttctctggttaacccatctgaggtccaactaccctctggagaacagcaaggagacagatttgttctctgtgattcttagagatgggtcccagtcttgggaagcaatggaagcctctttcctttcccattagggccatttacacctttcccaacttttggtttctttctccgggccatacactgaatccattgtcatcatatgcttaatttttctatcacataagccctcagtgaaggatgtcttctgggtgtctaaaaacattctgtttttaaccatatgtcagtttatctttggttgtgtgctgaacatggtatttgtaaaatacttgttgaaataatttgagggcaaggataatgttaccttcctctgaggaggatttgatttgtctttgcaaggcacctcagggagcttgcaattcaagatcaggttaattcaagcacaggactttttaccaagcaacttagaaatatttaaataattgaacaattgatacagctgtacaggtgcctcccaaatgaatatcagccctaaatgcccccaatacttaggttaagttcttgttaatatggctatataacatatcactcccaaatttaggatttgaaacaataattatttctcacggtttcagtgggttagctcagaagcagctcagctgggtggttcaaactcagggtctctcatgatgttgcagtcagatgtcagtaggaactggaggctccaattccaaggtggcccacttacaaggctggcaaagtggtgctggtgattggcaggaacccttaattcttctccatgtgaatctgtagatggagctgctcgagagtccttggagagcggtggctggcttccgcagagagagagatctaagaggtggaagatacaatgccttttgtgacctagcctcggaattcacaccccatcacttcctccacattctattggtcacccagagccagccctgattcaatgcgcaagggaactaagaaggacatgaatacgaggaggcaggaaccatcacaggctgtcttgcagactggttaccacacacagaaattgggacttgaatccaggcctctctgatgtcaaagtccttgtacttcactgtgctgccctccccaagcagcctcttgaatctgtggatccctctaagtgtaatgtcaccttcagcctgcaacagtacagaatggataaagtagtgatattaaacatgctgtaagagaagaagagaagcctaggctccttgagcatgattataaaatggggaccagtgaggagaggatagcctcaagaagaagaattgagaggggcttggttaactatccctaactggacattctgctttttgctgttcctggcatcagctatcagaaagtctctgtgggtgagtttctgagcactcttttatgccattaactacactcttgcgaagcttctgtttgaagggtttggattttcttaggcagtgccaggttttcagaatagaaattgactggtttctcccccagaaagtctatagcctaccgtgtttaaccccaacctctagtaatagctcaatccacgctgatcccccagggtttgcagaacagagtctcggttgcaaacactgcaatcagcagcttgctgtttttctctttttcttccactttattttatattgatatttaatgaatgtttctttggtggtattgctatgttcattatttaaactctgaaaattgaagccatagaaaataattgttgattcaccacagggagccatataaatattgttctaaattctaatgaccatgaccattgggattattttttgtgaagcataatttccattattttgaaagccctcaagtcagtatcttagaagggcagctgttttcttggctattttcaataggtttttcttctttcttcatttttccttccctccttaccacattagacaccctccttttatttcttcccttgccattgtattgttttttgtttgtttgtttttgtttgtttttgagacagattctcactctatcacccaggctggagtgcagtggtgagatctcagctcactgcaacctccgtctcccgagttcaagcgattcttctgcctcagcatcccgagtagctgggactacaggcgcacgccaccatgtccggctaatttttgtatttttagtagagactgagtttcaccatactctccaggctggtctcaaactcctgacctcgtcatctgcacgctttggcctcccaaagtgctgggattacaggtgtaagccaccacgcccagtctgtattgttatttttattgctattgttaatataaacgaggcctcaggacttagagcttcacaactaaataatacctgtgtacatcattttgtattttcaagttgtttttacaaatatcatcttatctgatgcacattataactgaatgagataaatgggacaaacgtcatccctatttacagataaggacaaaatcccaaagatttgcagagctacagggctggttagagcaggtccctcctccaagagcagatctccctcccttagtattatctcacccctccgggcctgggaaacctaaagatactttgtgaacgcatgtctgtatctacagaaagctctgctagttaaagaaactaccctagaccaagctgcgctctaaggggctggtgagctctgttatttttaaaattactttaaatattttttctttttaattaaaataatgagtcaaacatagggaggattacagaaaataatttggaaccaatcagatttatctgaggtgaccttttgccacagatgcttgaagtccatccatctctcttatgaaatgaaatgttacagaaacagctcattctctccctcctcactactccttgcctccctcccaaggctacttccatcctgagtagtgctttcttcagttgcatgttgatctactgttatatacaagaatgagttacaagtcatatgccatcagctttgcattttgcaagaattttcacaaatattatgctatcgcatgtacagactttaggctcactgctgaacaatgccctgggcttctttcatttttctgcatgtctcactcctctggctatgcctgtttgggctgggagagaatacagggaatgtccaagatattagcagttcctatggcagcaagtgctggtttctgtgactgtggttccctaagagaggcagaaaagcaaggggactaagcttccactgtgcacttaatcgcagggccatagcccaagtaggttgtaaaggccgatgacatcccaagacaggctggaacttgaactgacattttacagaggaaaaccaggcccagaaaagagaatggttgctttaatgtcacacttccagaaattggtaaagcaggaaccatctcagagcttatgacacctttgtactaaacacattgcctttaggcagtcttattcttcatccagtaaacagcagaccatggatttgattgttttctttcttttcttttcttttcttttcttttcttttttttttttttttgagacgggagtcttgctttgtcgcccaggctggtgtgcagtggcgcaaacttggatttgattgttttcttgcctctgctcccctgaggaaaatgccagcaaactataaaatttcattccctgagatcctggcaagctacattggacttaggtgtctgctgtttctgggaggcagcaaggatctgagtttgggggaagatcaggtcaccgggctgaagagtagcccgaagatcttttttacctggatcgccctctggtggcagattcgataacaaccgctctaattcatcatctgaaatgcaaagtggttgcagctcaagttttccttgctcctcttgggacttgctcgttcctcattaaagcatccctatgcccactctatacaagacacatttactttgagctgcatccctgagataatcgactccaagccaatatttctgtgtgtcagtcacagtaactggagctgtggcatggaaaataagaagaaagcattgttcctgaccccaaggaatttaagttaactgggtgagacaggcatacaggcagctgaccagactcggagtcagtgtgaccgagaatggacaggctgggggaatgcagagggaggaggccttggtggggaagctagtgtctgagttctcaaggagcaatgggaattctgaagttggagaggggcagggacactggaggaggggaggacagggcatggccccttcctccctccctgtttccccttctccttggggccttgctctctttctcttcctctttactcaccccagtaccaatagccctacaattcatgaccacccgaagcgtccattttctgggagaagattgggctccttagcctcttcctacagacctttctctctgagtcttcccatgggtccttctgacatctgaatagaatgaccaaggcataaatctcaatcatcgaggtttattaagtcagcttgagggtgcttccgggaaaaatacaagccacaggtacatctgtggctgtttttctcaagagagtttcaggggatttagtatttacacatttccttaaatgggggaaaggcttttaggaaaaagggcagacaggtggtaaggcgaatggctacattcctgtgagactctagctgctgcctggtaaatctacattttacataagacaaattggatgtttgaaaataaaaagagagtaaaggaagagtcaagtatgcagatgtctctgggtaggtataggaatgagtcttgtctttattctgcacctgcacttctatctaagcttgcgatcaacattatcagcatggaatcaactttaattttaggagctaggctgggcacggtggctcacgcctgtaatcccagcactttgggaggccaaggcgggcagatcacttggggtcaggaactcgagaccagcctggatgaaatggtgaaactccatctctactaaaaatacaaaaattaaggccgggtacaatggctcatgcctgtaatcccagcactttgggaggtcaaggcaagtggatcacctaaggtcaggagttcgagaccagcctgaccaacatggtgaaaccctatctctactaaaaatacaacaattagctgggtgtggtggcgcatgcctgtccaagctactcaggaggctgagacaggataatcgcttgaacccaggaggcggaggttgcagtgagctgagatcacgccattgcactccagcccaggcaataagaatgaaattccttctcaaaaaaaaaaaaaaaaaaaaaattagccaggcatggtggcatgcacctgtaatctcagctacttggaaggctgaggcaggagaatcgcatgaacccagggggcagaggttgcagtgagccgagatcgcatcactgcattccagcctgggtgacagaatgagagttagtctcaaaaaaaaaaaaaaaagaaattaagaactagacttagtttgtagacctaaagttacaattggcatgtccttgtgttgccaaaaaaaaaagaggtcccaatccagaccctaagagaaagttcttggatctcgtgcaggagggaattccaggcaagtcacagagttcagtggggagggaaggtttattgacggctactcaaatacagggtagggtgtcctcagaaagcaagcggaggaatgcctcgtctttacatttttcgtatataggagtcttctctatgtggagactgaactaagctgtgtctacctgtgtgggtgggctggaagcatgaccaaatttattattctgttgatttaaagaaaactactggtggcacatgcctgtaatctagcattgggaggccaaggtgggaggactgcttgagcccaggaattcaacatcagcctggacaacatagcaagacctcgtccctatttttaaaataaaatttgttctacaaaaaaattaaaaagaaaaagaaggccgggcgcggtggctcacgcctgtaatcccagcactttaggaggcccaggcgggtggatcacgaggtcaggagaacgagatcgtcctggctaacacggtgaaaccccatctctactaaaaatacaaaaaattagccgggcgtggttgcaggcgcctgtagtcccagctactcgggatgctgaggcgggagaatggcttgaacccagaaggcggagcttgcagtgagcggagatcgcgccactgcactccagcctgggcgacagagcgatcctctgcctcaaaaaaaaaaaaaaaaaaaaaagaaaagaaaaaaaaagaaaaaaaagaaaactattggctgggtgcggtgactcattcctgtaatctcagccctttgggagactggccagcaaattgtttgagctcaggagttcgagaccagcctgagcaacaaggcaaaaccctatctctactaaaaatacaaaaattagcctgcgtggtggcacacgcctgtggccccagctactcaggaggctgaggtggaaggatctcttgagccagggtggtggagtttgtggggaggtggagtttgcaatgagccaagatcacaccatttgcactccatcgcgggcaacagagtgagactctgttgggaaaaaaaaagaaagagagaaacagagagaagaaagaaagagaaaggaaggaaggaaagaaagagaaaaaaaaaggaagaaagaaaagaaaagagaaggaaaggaatctatccttgacactttagtgtgtgagtgcatcaaagcataattataattatcttgaaagcatatactattatgggtattgagacatctggactttcttttgttgtaggattgtgtccttgtaggtatccttgggctgtttcctcaattgaaaaatcttatgaccatagtttgtgattggcaaagaatgtgccttcctggttttcaaatggagttcattttaaaatggtgtcaccctggctctcctatgttcctgtttcccttgcttataggaggccagcagagaatttacttatgaatgatctgtgggggcagggctttgtagatgcttgaggccttttacctttccatggggatctggctgatgcataatgctagtaacaggtattcatttgaaagtgggtgttgcatgactcagcatctgggcttaagtttggaggtcctgacatttttaaatttcctttacattccccctgttcttcaaagcttttggagaaagcgttgaggaagacacgagattgtggtttattggtttatccaatcctatgtcaccatgaagcctccctcttaggtggtcacatcctagagagggggaaattacatcagaaaaggaccaatgccaaattacagcaacaaagggaaagtaatcctggaagctgatttaagctatgtgactgtgtcttcaattaaaatattcagtcccttcccctccccctccccctcccttccgtctccctctgttgctgaggctggactgtactgccgtggtctcggctcgctgcagcctccctgtcccgggctcccgtggttctcctgcctcggcctgacgagtgcctgggattgcaggtacgcgccgccacgcctgactggtttttgtatttttggaggagacggggtttcgccctgttgaccgggctggtctccagctcctgacctcgagtgttctgcccgcctcggcctcccggggtgccgggattgcagacggagtctcgctcactcaatgctcagtgttgcccaggctggagtgcagtggcgtgatctcggctcgctacaacctccacctcccagccgcctgccttgacctcccaaagtgctaagattacagcctctgcccggccgccacactgtctgggaagtggggagatctctgcctggccacccatcatctgggatgtggggagcccctctacccagccgccccgtctgggaggtgaggaatgcctaagcccggccgccccgtctgggaagtgaggtgcgcctctgcctggccgcctgtcgtctgggatgtgaggagcgccgctgcccggccacccatcgtctgggaagtgaggagcgctgctgcccggccacccatcgtctgggaagtgaggagcgcctctgcccggccgccccgtctgggaagtgaggagcgccgctgcccggccaccccgtctgggaagtgaggagcgcctctgcccggccgcccatcgtctgggaagtgaggagcgctgctgcccggccacccatcgtctgggaggtgaggagcgcctctgcccggccgccccgtctaggaagtgaggagcgccgctgcccggccaccccgtctgggaagtgaggagcgcctctgcccggccgcccatcgtctgggaagtgaggagcgctgctgcccggccacccatcgtctgggaggtgaggagcgcctctgcccggccgccccgtctgggaagtgaggagcgcctctgcccggccgccccgtctgggaggtgaggagcgcctctgcccggccgccccgtctgggaggtgaggagcgcctctgcccggccgccccgtctgggaggtgaggagcgccgctgcccggccgccccgtctgggaggtgaggagcgcctctgcccggccgccccgtctgggaggtgaggaatgcctaagcccggccgccccgtctgggaagtgaggtgcgcctctgcccggctgcccgtcgtctgggaagtgaggagcgctgctgcccggccacccatcgtctgggatgtgaggagcgcctctgcccggctgccccgtctgggaagtgtacccaacagctccgaagagacagcgaccatcaagaacgggccatgatgacgatggcggttttgttgaaaagaaaagggggaaatgtggggaaaagaaagagagatcagactgttactgtgtctgtgtagaaagaagtagacataggagactccattttgttctgtactaagaaaaattcttctgccttgggatgctgttaatctataaccttacccccaaccccatgctctctgaaacacgtgctgtgtcaactcagggttaaatggattaagggcggtgcaagatgtgctttgttaaacagacgctagaaggcagcatgctcgttaagagtcatcaccactccctaatctcaagtacccagggacacaaacacggcagaaagccgcagggacctcttcctaggaaaaccagagacctttgttcatgtgtttatctgctgaccttctctccactattgtcctacgaccctgccacatccccctctctgagaaacacccaagaatgatcaataaatactaaaatatatatatatatatatatatatatatatatatatatatatatattctttgggcaatcattattctaaccctaggttagttttttatgagtctctgaagcattttcattacagcagcaatctgacaggtttttctggactgtagtttgaatcaagtgtttaaatgaactttctgaaaagtgcatacatcagcaggcaaaacagttgcttatatgtaagttgctgttatttctcccaaagcttaaggtatatagcattagtttgcagagctttaagaaaagcacagttttaatttctagtaatttcaagtcagggaaaaaaaggggagaaaaagaaaaaaaaattttaatgttagtttagaggtgtatagccaggaaaaagttcaggatccagtctaaactgtagacaaataataagatcttaaaaataacgaacaaaggctgggcaccgtggctcatgcctgtaatcccagcgctttgggaggctgaggtgggtggatcatctgaggtcaggagttcgagaccagcctggccaacatggtgaaatcctgtctctactaaaactacaaaaattagccaggtgtggtggcacgaacctgtaatcccagctacttgggaggctgcgacaggagaatcacttgaactcaggaggtgaaggttgcatgagccaagatcgtgccattgcactccagcctgggcgacagagcaagactccatctcaataataataataatcctcctcctcctcctcaaaggtagaatctaataacaagtgtactatagtttcttttgaaacatatgttttttttttaatctccagtcccccatttctacaaaaaacgaatcatgttaggaccaatttatttgcaaaatatgttttagtctcattatccttggcctgattatttgcataaggcacagcaagaataatgattgggctgtataggtttcttttatttttttaatttttaatagtcacctaggcaagagtgaagtggcacaaccatggctcactgcagcctcaacatcctgggctcaagcaatcctcccacctcagcctcgagtagctaggactataggcatgcgtcaccaggcccagttattttttgtcgagatgggtcttactatattacccaggctggtcttgaactcctggcctcaggcagtcctcccatcttagcctcccaaagcactggaattagaggtgtgagccaccgtgaccagacaaggccccttttcaactggctttgctggaacttttcctaaggaatctcagattagacttttaaaagcctcttgaggttagccaatccaaggttttatctgtgccctcagatacctgtacaaattgggtacattcctctcttctcaggccgggcacagtggctcatgcctataatctcagcagtttggaagcccgaggtgggaggatcacttgaacccaggagttcaagaccagcatgggcaacacagggagacaccctatccacaaaaaaaaaaaaaaaaaaaattagccgggtgtggtggcacatgcctgtggtcctagctacttggggagctgaggtaggaggatcacttgagtcctggaggttgaagctacaagaactgtgatcatgccactgcactccagcctgggagaaagagtgagaccccaactcaaaaaaaaaaaaaaaaaaatttctcttttctcaaggtctcaaaataactcaagtttcccgggctcattagaaagtgacatgggtcaggaactttgtaaaggaattgcatagacaaggtaataggccagtctttccaatggatttttattagctctgtagagtcaacctccattcctcaaaactttctggtcatatctgaatatataccattccaattaaagccttggaaaaataaccagtgtctctaattgtgtcctgttacacaagaaaacagattcttattgaacttatgcaaataaccatgttgccataaattaataacactcacaatagtttccaaattctgaagaaatcagctagagggaaagaaatatgctttaaatattgctcaaaacagtatactttacttaatttgttgtgtgctgtaaacagttcaaaagaaaaaagttggctgggcgtggtggctcacatctgtaatcctagcactttgggaggccgaggcaggtggatcacctgaggtcaggagttcaagaccagcctggccaacatggtgaaaccccatctctactaaaaaatacaaaaattagctgagtgtggtggcacgctcctgtaatcccaactactttggaggctgaggctggagaatcatttgaacctgggaggtggaggttgcagtgagctgagattgtgccactgcactccagcctgggcaacagagcaagactctgtctcaaaaaaaaaaaaaagttttctggactggaaaacaaaagaattagcaatgtttcaaacccaaaagtaagaaaaaaatttcagtcctctattagtttagtcccatgtaattaactcttgttctgctcgatattgagttagcaatcctcatgaatgcatcagctttttttgtttgtttgttttgatacagggtcttgctgttgccctggctgcagtgcagtggcatgaacacagctcactgaagccttgaactctcagactcaatggatcctttcacctcagtcccccaagtagctgggaccacaggtacatgccaccatgcctggctaatttttgtattttttttagagacaggatttcaccatgttgcccaggctggtctcgaactcctgtggctcaagcaatccaccgacctcagtctcccaaagtgctggacttatagatgttaaccactgctcccagccttggctttttaattacagccctggaagttttttataatccaatggtatgctctctaaagttatcggaaacctgtatttttttttaaattttactttaagttctaggatacatgtacagaatctgcaggtttgttacataggtatacgtgtgccatggtgatttgctgcacttatcaacctgtcatctaggttttaagcctcacatgcattacgtattttttctaaagctctccctccccttgcccccgaccccccaacaggccccacctggtgtgatttcccctccctgtgtccatgtgttctcattgttcaattcccacctatgagtgagagtatgtggtgtttggttttctgtccttgtgatagtttgctgagaatgatggcttccagcttcatccatgtccctgcaaaggacatgaactcattcttttttatggctgcatagtggttccatggtatatatgtgccacattttctttatccagtccatcattgatagacatttgggttggttccaagtctttgctattgtaaatactgctgcaataaacatacgtgtgcatgtgtctttacagtagaatgatttataatcctttgagtatatatctacccagtaacgggattgctgggtcaaatggtatttttggttctatatccttgaggaattgccacattgtcttccacaatggttgaactaatttacacttccaccaacagtgtaaaagcgttcctatttctccacagcctcaccagcatctgttgtttcctgactttttattaatcgccattctgactggcgtgagatggtatctcattgtggttttgatttgtatttctctgatggccagtgatgatgagcattttttcatgtgtctgttggctgcataaatgtcttcttttgagaagtgtctgttcatatcctttgcccacttattgatggggttgtttaatttttttcttgtaaatttgtttaagttctttgtagattctggatattagccctttgtcagatgggtagcttgcaaaaattttctcccattctgtaggtctcctgttcactctgatgatagtttcttttgctgtgcagaagctctttagtttaattagatcccatttgtcaattttggcttttgttgcaattacttttggtgttttagtcatgaagtctttgcccatgcctatgtcctgaatggtattgcctaggttatcttctaaggtttttctgttgtgttttgagatggagtttcactcttgttgcccaggctggagtgcaatggtgcagtctcagctcactgcaacctccgcctcctgggttcaagcaattctcatgcctcagcctcccaagtagctggggctacaggcgcatgccaccatgcccagctaatttttgtatttgtagtagagacggggtttcaccatgttggccaggccagtcttgaactcttgacctcaggtgatccacccacctcagcctcccaaaatgctgggattacaggcgtgaaccactgcgcctgacctcttctagggtttttatggtttggggttttacatttaagtctttaatccatcttgagttaatttttgtataaggtgtaaggaaggggtccaatttctgttttctgcatatggctagccagttttcccagcatcatttattaaataggaaatcctttccccattgcttgtttttgtcaggtttgtcaaagatcagatggttgtagatgtgtggcgctatttctgaggtctctgttctgttctgttggtctatttatctgttttagtaccagtaccatactgttttggttactgtagccttatagtatagtttgaagtcaggtagtgtgatgcctccagctttgttctttttgcttaggattatcttggctatgtgggctcttttttggttccatatgaagtttaaagtagttttttctagttctgcaaagaaagtcaatgatagcttgatgggaatagcattgaatctataaattatttgggacagtatggccattttcatgatatcgattcttcctatccatgagcatggaatgtttttctgtttgtttgtgtcctctcttatttccttgagcagttctttgtagttctccttgaagaggtccttcatttcctttgtaagttgtattcttaggtattttattttctttgtagcagctgtgaatgggagttcactcatgatttggctctctgcttgtctattactggtgtataggaatgcttgtgattttttcacattgattttgtatcctgagactgctgaagttgcttatcagcttaaggagtttttgagctgagagacgatggggttttctaaatatacaatcatgttgtgtgcaaacagaaaaaattgtacttcctttcttcctatttgaatacccattatttctttctcttgcctgattgcactggccagaacttccaatactatgttgaataggagtggtgatagagggcatccttatcttgtgccggttttcaaacggaatgcttccagcttttgcccattcagcatgatattgactatgggtttgtcataaatagttcctattattttgagatatgttccatcaaaatcctagtttattgagagtttttagcatgaagggatgttgaattttattgaaggtcttttctgcatctatttagataatcatgtggtttttgtcattggttctgtttatatgatgaattatgtttattgatttgtgtatgttgaaccagccttgcatcccagggatgaagctgacttgatcatggtggataagctttttgatgtggtgctggactcggtttaccagtattttattgaggattttcgcatcgatgttcatcaggaatattggcctgaaattttcttttttttgttgtgtctttgccaggttttggtataaggatgatgctggcctcataaaatgagctagggaggagtccatctttttctgttgtttggaatagtttcagaaggaatggtaccagctcctctttatacctctggtagaattcggctgtgaatccatctggtcctgggctttttttcattggtaggctactaattactgcctcaatttcagaacttgttattggtctattcagggactcaacttcttgctggtttagtcttgggagggtgtatgtgtccaggaatttatccatttcttctacattttctagtttactggcttagaggtgtttatagtattctctgatggtagtttgtatttctgtgggatcagtggtgatatcccctttatcattttttattgtgtctatttgattttctctcttttcttctttactagtctagctagcggttcatctattttgttaatcttctcataaaaccagctcctggattgattgattttttgaagggttttttgtgtctccatctccttcagttctgctctgatcttagtttttctagtcttctgctagcttttgaatttgtttgctcttgcttctctagttcttttaattgtgatgttagggtatcgattctagatctttccagctttctgatgtgggcatttagtgctataaatttccctcttaacactgctttagctgtgtcctagagattctggtatgttgtctctttgttctcattggtttcaaagaacttctttatttctgccttcatttcattatttatccagtagtcattcaggagcagttgttcaatttccatgtagtagtgtggttttgaatgtgtttcttaatcctgagttctaatttgatgcactgtggtcagagagactgttatgatttctgttcttttgcatttgctgaggagtgttttccttccaattatgtggtcattttagaataaatgctatgtggcactgagaagaatgtatattctgttgatttggggtggagagttctgtagatgtctattaggtccacttggtccacagctgagttcaagtcctgaatatccttgtcagttttctgtcttgttgatctgtctaacatattggcagtgggatgttaaagtcttccactattattgtgcggaagtctaagtctctttgtaggtctctgaaaacttgttttatgaatctggttgcatatatatttaggatagttagctcttgttgcattgatccctttaccattatgtaatgcccttctttatcttttttgatcgttgttggtttaaagtccattttatcagagactaggattgcaactcctgctttttttaaattttcatttgcttggtaaatattctccatccgtttattttgagcctatgtgtgtctttgcatgtgagttgggtctcctaaatacagcacaccaatgggtcttgactctttatccaattttccagtctgcgccttttaattgggacatttagcccatttacatttaaggttaatattgttatgtgtgaatttgatcctgtcatcatgacgctagctgattattttgcacattcattgatgcagtttcttcatagtgtcattggtctttatattttggtgtgtttctgcagtggctggcaccagttttttctttccatatttagtgcttccttcaggagctcttgtaaggcaggcctggtggtgacaaaatccctcagcatttgtttgtctggaaagggttttagttctcctttgcttataaagcttagtttggctggatatgaaattctgggttgaaaattcttttctttaagaatgttgaatattgccccccactttcttctggcttgtagggtttctgccgagagatccactgttagtctgataggcttccctttgtaggtaacctgacctttctctctggctgcccttaacattttttccttcatttcaaccttggagaatctgacgattatgtgtcttggggttgctcttctcaaggaccgtcctagtgatattctttgtatttcctgaatttgaatgttggcctgtcttgctaggttgggaaagttctcctggataatatcctgaagtgtgtcttccattctccctgtcactttcaggaactccaatcaatcataggtttgatcttttcacatagtactatatttcttggaggctttgtttattccttttcgttcctttttctctaatcatgtcttcatgccttatttcagtaagttgatcttcagtctctgatatcctttcttctgcttgatcgattcggctattgatacttgtgtatgcttcacaaagttctcatgccatgtttttcagctccatcaggtcattaatgttcctctctaaagtggttattctacttagcagttccttttaccaaggttcttagcttccttgcattggttaggacatgatcctttagctctgaggagtttgttattacccaccttctgaagcctgcttctgtcaattcatcaatctcattctctgtccagttttgtgcccttgctggacaggagttgcaatcatttgaaggacaagaggcattctgatttttggaattttcagcatttttgcactggtttttcctcatctttctagatttatctacctttgatctttgagactgatgaccttttgatggggtttttgtgtgggggtcctttatgttgatgttgatgttgttgctttctgtttgttagtttttcttctaacagtcaggcccctcttctgcaggtctgctgcagtttgctagaggtccactccagaccctgtttgcctgggtatcaccagtggaggctgcagaacagcaaagatagctgcctgctccttcctctggaagctttgtcccacagcctgatgccggctgtagctcttctgtatgaggtgtctgtcaacccctgttgggaggtctctctcagtcagtaggcacggggatcagggacccacttgaggaggcagtctgtcccctagcagagctggtgcactatgctgggagaatccctctcatcaggatcagctgctctcctcagagctggcaggcaggaacgattaaatctgctgaagctgcacccacagccacccgttccctcaggtgctctgtcctagggagatggaggttttgtctgtaagcccctgactggggctgttacctttcccctgagatgccctacctagtgaggaggaatctagagaagcagtctggccacagctgctttgctgcaaccagcccagacttcccagcctccttagcactgtcaggggaaaaccgcctactaaagcctcagtgatggcagatgcccctccccacagcaagctcagttgtcccaggtcgacctcagactgctgtgctgggagcgagaatttcaagccagtggttcttagcctgctgggctccgtgggagtgggacccactgagcgagaccacatggctccctggcttcagccccctttccagagcagtggacagttctgtcttgctggggttccagatgccactgggataggaaaaacaaactcctgcagctagcttggcgtctgcccaaacagccacttgtgttttctgcttgaaatcccaggccctgttggtgtaggcacacgaaggaatctcctgatctgcagattatacaaaccatgggaaaagtgtagtaacctgtcccaggtagcacagtccctcatggcttcccttggcttgaggagggaggtcccccagctccttgcacttcctgggcaaagtgacaccccaccctgcttctgctcgccttctgtgggttggacccactgcctaaccagtcccagtgagatgaactgggtacctcagttggaaatgcagaaatcacctgccttctgcgttggtctttctgggagctgcagactggagctgttcctattgggccatcttggcccccttcagaaacctgtatttaagaatacttgtcagagtcttttccatgaatttccatatagaagcaaattttggtctacagctgattatgaacctctttttgagaagaatcaaaaagtaaaacaataattgtctgtggatggcaacagtcttagatcagccatggttaaagacacaattggcaagaaaatttgattacttctgtaacagaaaaaaatttaacataataattataattattactaataacatacattaagacatcagaattatatgtatctcatacaattttggaagacatattaataacacccataaaatataatccaaggaaaggcaaacactgtttcatatttgacaaggctttctctaggattttaacataccaaataaacccaatacgtctctcttggactttcagggacattaatatctaaaaggttagtttaaggtcaaaaagactaaatttagaacttgaagctttgattttgaaaagtttgtctaatatcaaaggttcaaaacacttgatatcataaaataggatgacagattactgtaaactaagtcattcacttagccaaagtgataattcacaaatttacacttcccattgcccacccctcatgccttccaccctgagatttaacaatagtgatggtggcaggaggcagacaggtacctaggtgggaaggggtgggtccctggtgaggcccaaccttcaaaccagggatggcctgaagcctggaggccaagctgccagttccaggtggagtccctgactgggagtaagaatttccttgatgcctttcagccagttgatggtgactggttttttggacctacccttgaaccaatcagcatgcacttcctcccactcatggaccaatcagcatgcacttcctccattctgcacctataataacccctagactcagcaggactcagacacacattgggattaccttcctgcaggtaggagctacccactttgggtctcctctctgctgagagctgttctgttgctcaataaagctcttctccatcctcaccctccagttgcctgagtaacctcattcttcctggacttgcgataacaactcaggacctgcgaacagagtgcacaaaaagggctgtaacactttcctggccagctcactgagctgcaggtcgtgatatgcttccctgttcaccaaactgtgggagtgaagagtggtgacccttctggggacgcagacctcagaattcccaagccagagctgtaacactatagccctcccgccctccaccagtgctgggcggctgccagatgtgacaggaagcagtggcggggcaggccagcccaggagctgtgggctggagttggggtgatgggattgaacaagccgtaacacaaatgggctgaaacacattgcctcccaccgctgtttgccatgctgtcgcgctgcgggtggtgggaatgagagagctgtaacatgcacccccaacccgtagaggatctgcagttgctggcatctccaggttttcaggagccaccacattcccttcatccagatgctggcaactgcaggagaagccgcttgtagtatgcctgctccagccgcagccttgcatggagccagtgcctatgccggtgcctggagccgtccgccctgctgcggcagttggcgtgcctggctgtgtgcaggggccacactccgcacttgctcactcacacacccttcgcctttctgcatctggcttgccctcggcaggcatgggatctgggctggtagtgcaagctgggcacagcctgccaggctgaatgggtggaatgaacccagtgggcgtgagcaatattcaagtagaggcgctgccggccatgaggtttctagctggtgaagcgacacccagaggatcctgtgacaataggatttctgaaatctgcattggcttgtgtacaatttgggcactgtatgagtcaattgggggaaacagtttttgaacaggagctgcagggaattagaaaaatctaaggcagactgacagaaaagtcttcaaagggagacaaaaacaggcttttcctactgatgaaatgggacctactgtcgatgactgctacagagttactctagaagaattcagaggaagatgtgaggagttcactctggagccacagtggccggtagaggctggaaagaagagagaaaggaacttactgtcattgcaatgacaatgacaataagatctgagcaagaaggacagtagggagaagctgggaacaaagacaggagggcttgggatgtgcttaaaggagaacacttggtttattttccctgggttggagggcttaggtatatttttgtcttataaggtccacagttagattttcttaaggcacaggggagccattgagggttagggagctggagagtggtgtgatgaaaggtatgtttgcatagcttctataagtaaatgtttctttccactggtttcagtgacaaggcaccagctctcccgatactgtggttcccgcaggagtcccctatgcctatgtaggcaccacccactgtgacaggagatgcccttcctgcccacagtgtctgcctgcattttgagactttctgcttccccagggtgagtgaggaagctggcaacaagcctcactcaacgagaggaaacttgaggccagctgggcacttgagggaaggagaccagcagtggaacacaagtcggggtcccaggatccctgggctttacctgacacttccacattccaactgtggggtccataagcaagccctgcaccttctcagtctcaagatccactgacagccatgccatcctctccctgtcaccaaagcagtctggccttccagctggcctccagatgcaaaggcagagtctgatggagacttggtgtcctgagaactccagaatgggctgtcagtgctctaatttttcaggtatgtctattcccataatttgaaaacagtgataacaataataataccatctatggggcactttctacatgcaaggcactccactaagcccgttaagaatgctatttcaatccttatgatacacgtatggtgtaggaaccgtgatgccacttttgtggctgaggaagctgagagtaataaaagttaatggacttgtccaaaagaattcttctaactctagaattcaaaccctcaattcatgtggcagtaattctaaagggtcacccattgcatttgcatgtcagccccatcctgtgaaagtacagattcccaaggcttccctgcagacagactgaattggcctgtctcgggctggggcctgagagagcctgcacttttagccactgcaccaccactttccacctcccctacactgccgggacagatcgtattttcccaagatggacacatctatacatttattccatgccacctgctcttcttgcaatgtgattaaccttcctcttcctgaaaggtggggtctagtttccctccccatcaatctggatggaagcttgtggcttctccaagcagtgaagtgtggtgggagtgattctaggtgacttctaaggttagctcaagaggatacagcttctgcctggtgtttcctccctctttccctcaatttctctctccctccctccctcccatttcttattttttaatgtattaatttaacttttattgaagtatcgtatatgtgtattacatgtaatagtatacacacacacacagaaaaacgtgcaaatgtcataagggtacatcttgataaattttcttttcttttccttttttttttttttttttttttttttgagacagagttttgctcttgttgcccaggctggagtgcactggtgcgttcttggctcattgcaacctctgcctcctgggttcaagcgatcctcttgcctcagcctcctgagtaactgggattacaggtgcctgccaccacacctggctaatttttttgtatttttagtagagatgtggctttaccatattggccaggctggtctcaaactcctgacttcaggtaatccacccaccttggcctcccaaagtgctgcaattacaggcatgagccactgcgcctggcccttgaaaaattttcacaacctcaactcacttgtgtaaccagcaccaaatcaagaaatatacaaaaaagccagcatcgcaaactcaacaacaacaaaaaacctgattcgaaaatgagcgaaggacttttgtagacctttctccaaagaaggtatacaaatggccaataagcatttgaaaagatgctctgcatcactaatcattagggaaatgcaaatcaaaactatagcaagataccacttcacactcattaggatggctactttaaaaaaaaaaagcgtgcgcacgcacacacacacacacacagaaaataacacatcttgtgaggatatggagaaattggaacctttgtgcactgtttgtgggaatgtaaaatggcatagctgtggaggaaagcagtatagtggttccttaaaacattaaaaatagaattaccatataagctagtaattatacttctgggtatatactcaaaagaattgaaagcagggtttcaaagagatatttgtacacttttgttcatagcaatagctaaaacatggaaaaatcgaattatccatcagtggatgaatggataagcaaaatgtggtgtatctatacaatgggatattactcaccttagaaattctgtaatatgctatgctaaaacttgaagatattatgctaagtgaaataagccagtcacaaaaagaaaaataccatatgattccacttatatggaatctacgtacttagtcaaaataaagacaaaaagtagaatgctggttgttagggactgagggaagaagggaatggagagttaatgtggctggcacaggagcccaccatcaggagctctgggttctgggaactgctctgctcagactgtttgagacttcaagacccttccacaatctggacctagttcctttaggggaatgcagcctgtttcagaatatgcagtattgcacagaatcacctgggttatggccccttcatggcgtctctacaaaaatatctatatatataaaaatcactcaagcatggtggtgcacctctgtggtcccagctactcaggaggctgaggtgggaggatagcttgagccaaggaagtcgaggctgcactgagccaaaatcgcatcactacactccagcgtggttaacagagtgagaccctgtctcaaaaaaaataaaaataaaaataaatcactattgcaatcacagttttgtagatggcagcatagggcatgactcatccctgtgtgctcagggtctcaggagctccaaaccccaaggaagtgcagccattctgctaaatcactccaggaatcaacccctgggcgtcttctgaagcacatgtctacaccggggaagaaaacctcctccataacactaaatgctgaaggtaacatgagaaggacttggataaatttattgcacttcaactactggagagctatttaggcagcacagctgccatgggctgcagcctacccgtgccccacagcttagccaaaagaacctggcatcaagaataaatgtcatgtagcaaaggagcctctatggagttggacatcacaatttccagtcatgctttctgccctcactatggggagggcaaagaacttgtgagctagattgaaagctccatccttggtaggaaactggaaggccaggttagagtgtgggtcccgatttcccagaactgagctggtgtttccaagggacctccctcatccctgggcaacaggacagctggtcagcatagtggctataggtgcttgggtgagagaggtggcaagtggttaggaggtggctgctagaagaatgaaggattggggcagacagctagctgctcatcacaataatctgagggctttaaaactgctgatattcactcagccccacaaaacagtagcaagagctggggaagtgaggtccaagaggcagtaactttgatgaaactaccaatgagtctcatgtgcagccaggatgacagcacatggtaagaacagcaacagtggctatcaacaccagtggtcgtcagcaccagtgactgtcagcaccagtgaccatcagcaccagtggccatcagcaccagtgatcatcagcaccagtggccatcagcaccagtgatcatcagcaccagtggccatcagcaccatggccatcagcaccagtgggtcatcagtaccatggccatcagcaccagtggcccgcatgggaggggttctcacatggggcttctgcctggctacctggtgagattctccagggctgagtgttttcagaggacctagttgttacggatcatcctgcatctgcccttcctggcacattaatgatcacagtcagcatgcagcacaaagccaggtgaagctttccggtaaggagggtcgcaggcagccagtggctccaccttcgtgtgcagacaccacgtgttctcaatgatcaacacacagtcactagggacatgaacacattgtggcataaaccgtgtccgggtgtgaatgtccacagactccaatgtccctgtatacactcaggtgcacagccccttccagctccaagtggcaggtgccaggaatctcaggtaaaaatgtgggcctttggtgctgagctgaagcaggaattctccactgttctgggtgtcctagaccagaagtaaagggagacttccaccttacaccagtgcgccttgcatatggcaactgctcttcaagggacaactgagtgaaggactcagagccccagttggaactcagagggcacccagggcctcgaccctcctccctgacaacctcacccccagctcagtccttggcatcccgccaaggtgcctccatgataccttggacttctaggagcaagagtgaaatgggattcagtgagttttattctgggaccttcctgaccttctggagggtctccgtggagaagtgactcctaatatctttgaattctaagatagtcatttttgagagctaggtaagtactatgacctctccttacagaaagatgaatacgctttcaggaactcagtggtctctatggagcccatctgtgggtctcacatcaagaaacttccagagacagatctgactctgaagactgcagggcactgcaagaactcgatgggtacctgaggccagaaactggcagagctcgcggaggaagccaccagcccctggcccggcctccctcttggctgttcctcccccgggccctaccgggctgtgcgtttgataggcagctggaagacccaggtgggcggttcaatcggtcacgtggacacgcagctcagccaattagaatctcgcggcagttgattcctagaggtggaatccattaaactgacaaagccccagtcccggggtcctaatagtcgggactattaggtcatcctgggtactcaggcctctagactctagactgagctgccttggtcactcggggacagttggcagagtattcgtggtcagggaggtgacccgtggtcagcaggatcaggccacccagggacaaagggtgcttctgcgccaggccctggagaaggacagagcggtggggactcggggtcggccgcagataggggagtcaccacctgccgggtaagaggggattcatcacaggggccgaggcaggacgagcgcctcctcccagctcaggccgggtcccaggctggactcctccctgtcccccagggccggcctccttcagagctggctcgggacaagcctgggatggaaaggggaagtagaaagagctcagggcacagggattggggccgatcctggggtctgagctgtggggtgaggaggggatcgcctgtcccctggggagtgacgatgtcacccagccgtggccgatgctggaggtcatgatctgaaccttgacaggtaaccccagggctgccttcctgttcttcccctgggctgtcaggggacaccctgctctgttttgtttttaagtgaccagagacagacacgtaacatagaaaacgctatcactttgatcatttgtttcaaatggaagaaaaaccgacacaagtgggtttctggtgggaagcgcttccctccaactccaggaactccatcaaggagttaagaaagcacagagtcctgtcagcagccagagacatgctgggcagtggtgacctcggagccaccccgcgacatggagatctcgagctccgccctccgtgcagggagattccttttggaaaaaatctctggcagagtgggagggtgtaggggccagccacatacatgcttgctgctaggaccccttagccatgggcagggtgggcacagtgaccagggccaggaaacttacaggcccaccaaagagtgtcaatttcagtcagaagaaaaaaaattgaactatatgatattaatatatttatcattataccagtaactcataaaataaaacttcaaactttttttattttttgagacagagtcttgctgtgttgccaggctggagtgcagtggctccatctcggctaactgcaacctcctcctcccaggttcaagccattcttctgcctcagcctcccgagtagctgggactacagccacccaccaccacgcctggctacttctttgtattttagtagaaacagggtttcaccgtgttggtcaagatggtctcgatctcctgacctcgtaacctgcccgccttggcctcccgaagtgctgggattacaggtgtgagccaccgcacccagcaaacttcaaactttttaatggaacaaggacacacagacattaatccccagtgtccatcaaagttgcaatgcagccctaacgcctggcatccttgaaagggacgggcatttagtaatgagatatgcacagcagcatagtcagctgtgtggtgcattctcagctgtgcctcagcagccctgatgcagacatccagaaggagcacagccactttatccagaggtgaagttttgcagcaagacagcattcatagggggagttctcaacaaatgtcagtccccaaaaagggaactggctttattatggtccttaggatattcactcgtagagaacaggacctgacagacaaagcaaagaacgaatactaagattagaagtatttggcacatttgggatgagaaggaggcacaatgggaaagtgttgagttgaaatcaaacttgggttaaatgtgttcagttttgcccaggatcattcttggccacaggactcagtttgctgagcaggtacacaacacacaaggatacaagcagccattgcacacagacacacccacatcagacacaacctgctcccctctcctccctgcaccaacaggcgcatgtggcaggggtcctggtggagctcttccaggagaagtgtctggggaccctcatgggaagggaactccgtgtcaaggcaccccctttcctcagccacagtgagctcttgggagctgggcaatggtgtgggagaggttgtggggggtagcaaagcaggggaaccagcctggaattgtctcagagaaagaccaggccactaagagtgcagatggagacatgagacatccgagggagggaggagaggggaccccctcgtgaaattggggctcacgtaaacctgcatcaagcactgtggcagtgttcaatcagaaatgctgcccagtacccaggtggggcacatacatgctcaacacgtgaaaaatatctgttctgatttgtgcttcagaagaagagttaatgtctccttcatctttctctctagcaatcagccatgactgcctttgcactgtccatgctctcagcccaccacctcctccccctgccattgcagtggctaacactggagacgaagaccaagacaccaccgcctttctccagtaccactcaaatcagcacaggcaaggacaaaggcctcaatccacaactgctgaagatggaccctggccacatgggatggtcagacacgcctgcccagctatctgcaggcgaagaggctcagaagaggtttaggggcctgaaggacatcttgcttccatgtccatatgagcaggctatttctgctccatgagtcaattttgccatataaaatacttaatttcagccattccagggtgctgtaggatgcacagcttcccatcagcccacctgaactccagccatgccattttaataccaggaataaggtcacctgctttcctgccccttaggaggccagagccgtggaagcaaaatggcacttctgtttacctgttatattatttttttgtcatccttatatgcttggaaaatgcaattatatgaaaaaagtttagtaattacagacataacagcagaaagtcctcggaaccaagcttactctcatggccgattctgctccacctgggactctgctgtgctgcgggcatcctgtggtcagaatcgcagaggggccatcagggagggccttcccagaggatggacctcacgtgactgctgcgtgggcaagtggcactggccactctgcctggagagaggagtaaatgcagggctggccaggcgacctgcacactctgctactggccttgtccatctttagcctctaatttgaaaatgaggctcacacagaccaagagtatctttgagggttagtacagaccacagaaatgccctgggcctttcactctctccttttgcaaattcccatgtgtggaaatgccgtttggataatgagggagcctgaaggaggtggacacatgagcagccccgacaggcctggctccatcctctgaaaatggggccccgtgcccggcgtgtggccttactggttcagtcttctttacagtggtaggttttgagtgcccagatgcccagtgcctcctacctggaacagcacaggatctggcagacccctggaagaatcacatgcacacttaaatattcagggagttcccacccagcagagctcgcctctgtggctaccttggtcttgctgctgatatctgccagaaaaggcctggacttggagacaagcctgggatttacactcagtccttccccatctggctggttccatttccttggctctcactgctggaagtctgtgctcctgaacatcaagtcagagggggcatctgaatgcagggcagggagcctcagatgggaagaagtcagaggaaccagaatgtgtcagaaaatgccaagtcatgtgcctgagctcaaaagtcagctgggccacaggctggctgtgtgatcttgggcaagttcaaccagcttctttatacctcttttcttgcctcaaaatgataagagaaaccacttcactaatacactgagggctgctattaagttctatgtacaaagacccatggcaggccctatgcccttcggtgagcactactcctccttacaatttactgccaggaacactgggcaagagaacttcagtggagcagggattggctgagcatgagccagggttgggggaagtaaataatgggctgttgccagggcctgagcccaacagagaaaggctgtgtgcagagggagggcctcaggtcctggggctcctcctggcctctttcgtcccgactacttcacaccctcctctaacaacgactcccacctccttttccagctctccttgatcctgctcagggtggcgcctgctgtccctggtcccttggtccccacctgcctcagtgccccccagtcacatctgctgtttctgccatgggtcagcagacagggtaggggtgactggtggtgcagaagaaaccatctgagagggggaccccaacacggacagggcacagacggggcttccaccaatctcagtggatgaagattctgtccctgccatccccgcattctctccctggtctcagaggccctcctgggtctccagttgtcctctctcccacctccacactttcttgttccagtcctgctcttggatttctttaataattttcctacctccaagatcccctgatgatcagtttctgcctggggtcaccaggcgactgaccatggtggggatggtgacttgagactcctggaccacagtgcaggtgacatatgcaacctacagagtgaaaaggaacagtgtcactgctgggtcattttgaagatgaggcttaggtaatggattaaagacttaaatgttagacctaaaaccataaaaaccctagaagaaaacctaggcaataccattcaggccataggcatgggcgaggacttcatgactaaaacaccaaaagcaatggcaacaaaagccaaaattgacaaatggcatctaattaaactaaagagcttctgcacagcaaaagaaactaccatcagaatgaacaggcaacctacagaatgggagaaaatttttgcaatctacccatctgacaaagggctaatatccagaatctgcaaagaacttaaacaaatttacaagaaaaaatcaaacaactccatcaataagtgggcaaaggatatgaacagacacttctcgaaagaagacatttatgcaaccaaaagacacatgaaagaatgttcatcatcactggccatcagagaaatgcaaatcaaaaccaccatgagatactatctcacaccagttagaatggcaatcattaaaaagtcaggaaacaacaggtgctggaaaggatatggagaaataggaacacttttacactgttggtgggactgtaaactagttcaaccattgtggaagacagtgtggcgattcctcaaggatctagaactagaaataccatttgatccagcgatcccattactgggtatatacccaaaggattataaatcatgctgctataaagacacatgcacacgtaagtttattttggcactactcacaatagcaaagacttggaaccaacccaaatgtccgtcaatgatagactggattaagaaaatgtggcacatgtacaccatagaatactatgcagccataaaaagaatgagttcatgtcctttgtagggacatggatgaagctggaaactatcattctgagcaaactatcacaaggacagaaaaccaaacaccacatgttctcactcataggtgggaattgaacaatgggaacacttggacacagggtggggaacatcacacactggggcctgtcatggggtgaggggaggggggagggatagcattaggagatatacctaatgtaaatgacgagttaatgggtgcagcacaccaacatggcacatgtatacatatgtaacaaacctgcacgttgtgcacatgtacccgagaacttaaagtaaaataattaaaaaaaaaaaaaaagatgaggctcaggcaacacatgtcccttaaatccagtctatgagggcaccacaaagtccttattctttgcaaattctagcagagaggttgtactagttttggagagaggcctcaaaagcaagatcctgtttcttgacacagcttaccctggtgaagctccctggccaagcacaaactcccaggtcaagcacaaacagccttcaccaatggcaccatcagccctcaaagaggaggtggcactaacactgtaagtgggcagctgctatggtcttctgctgcctggagagttttgcctccatcactgctgaccacctggggaattcccaggaactactcttcaaaggtacactcggatgccccctctgcaaagacattttgttcccttactgtacctctgaaatcatttgttatccaagcatttgcaaatccacctgtcttctgtgtgtggctttctgtgtggcatatctatggacattgagggtgaaaaacaagaggaagactctgttccttttcttagggagctcacagttcactggataagacagaaggaagccattgactctgaaagggaacaggatgtggcaaagatggggcagaggggtgagcacagaggggatcaagagaagggggagaaagaccattgtcatcagtgcagcctttctggggagcaatgtgtgagctgagctttgaaaaagaaatgaggttttaaaagagtgtgggaggagagccctcctgagatgtatggagagaccagtgcccctcgtccctgccactcccgctcctgcagctgttcccttcttccctctgtcccagctcagcacagtcacaactctccaaatcatgacactcaaaatgccacatctaaaaagaacatcatggctgggtgcagtggctcacacctgtaatcccagtactttaggaggccaaagtgggtgaatcacctgaggtcaggagtttgagaccagcttgactaacatggtgaaaccctgtctctactaaaaaaaaaaaaaaaagttagccgggcatggtggtgcatacctgtaatcccagctactttggaggctgaggcaggagaatcacttgaacctggtgggaggaggttgcagtgagccgagatcataccactgcactccagcctgggtgacagagcaaggctccgtcaaaaaaaaaaaaaaaatccgagttctgggtgggtgcctctgcttcttctgacttgaccgcccccttccctgctctctttgtgtctcatgtagttgtttccactcactcaacctccatactccctggacagcacatgaaaaaaattgcaactctgaatccccatctgcttgtgtgtgattcgtatcctctgtgagtcaacaaggtgaatatattcctcatttggttgcgggattttttaaaacgtctcaaacagtctctgccccctgagaaagtaaattcattcacctacaaagagaaaggaaagggacagccatccaccaattgactcctgagattccctctgcatccttcaacacttattgggacttacatgaaacaatatgacaactttttatttctatcaaactacagctttcttccttgtatctgaagaagttggcaccctctacacagaataggagagcacaatttcaacagttattgcatacatcactgaccattcttactactcctcaaaattcattgcaggtccaccaaatgttctgtttgttgaagattaaattataaaattaaatttcagcaatatgcatatataattaatgaacccagagaaaagatcaaaatggtgagcatataatataaatgtgtacatattacaaagaaaaaatatggaaagctactatcatacttacttgtttttctaatctgtcatgaggccattttttttttttaagacaaggtttcactctatcatccaggctagagtggagtggccccatcatggctcactccagcctgggtttcctgggctcaactgatcctcccaccttagtatccagagaagctgggactcacagcatacataaaaattaatttcaaaatggatcaaagacctaaatataagaactaaactataaaactttttgaaaaaaacataggggtaaatgtttgtaactttggatcagaaaaataattttttaaatatgacaccaaaagtaaaagtggccgagcatggtggctcatacctgtaatcccagcactttgggaggccaaagcgggaggatctcttgatcccaggaatttgaaacgagtctaggcaacataaagagaccccatctgtacaaaacaaaatttaaaaattacctgggtatggtggcatgtgcttgtaggtctactctagctactcaggaggctgaggcaggaggatcacttaagccaaggagtttgaggcctaatttgaggccgaagtaagccatgattgtaccatcatgctccagcctgggtggcagagtgagacccctgtctcaaaaaaaaaagtacaagtgacaaaaacagaattggagttcatcaaattaaaaacttatgacttctaagaccaccaccaagaaactaaaaagacaacccataagatgggagaaaaacttggcaacttgtctatctgttaagggacttgtatcagaatacatagggaacccttaacaactcaacaaaaggcaagtaacccaagtgaaaaaatgagtaaaggatttgcacagacatttctccaagatgatacacaaattgccaataatcacataattagatgctcaacaccattagtcactagggaaaggcaatcaaaagcagaatgagatgccactttataccccctagaatggttatgataaaatctacagacgagaagaacgagtgttggtgaggaaggagaaatgaaaccctcatacactgctagtgggagtgtgaaatggtacagtcattttagaaaacaggttggtgaccaggtgtggtggctcacatctgtaatcccagcactttggaaggccaaggtggacagattgcctgagctcaggagtttgagaccagcctgggcaatatggtgacacccccatctctacaaaaaaataataaaaaattacctgggtgtggtggcttgcgcctgtagtcctagcaacctgaggggctgagactggaggattgcttgagcccaggaggtcaaggctgcagtgagtcatgttcgtgccactgcactccagcctgggtgacagagtgagaccttgtctcaaaacaacaacaataaaaccataaaataggttggaaattcccctaaacaattaaacagagttacactttgacccaaaaattataggccaggtgtggtggctcatgcctgtaatcccagcactttgggaggccgaggcaggtagatcacctgaggtcaggagttcgaaaccagcctggccaacatggtgaaaccccgtctctaccaaaaatataaaaaattagccaggtgtggtggcttgtgcctgtaatcccagctactcgggaggctgagcaggagaatcgcttgaacccaggaggaaaatgttgcagtgagctgagatcacgccattgcactccagcctgggcaacaagagtgaaactctgtctcaaaaataaataaataaataaataaatgaaattatactcttagatatatatacagaaatgaaaacatgtctatgcaaaactttacacaggtgttcatagcagctttattcatagtaaacaaaagtggaaacagttcaaatgtccaccagctgatgaatggctaaatgtaatacctgcatacaagggaatatttttcagcaaaaaaagttataggccaggcagggcagctcatgcctgtaataccaacattttgacaggctaagaggatgatgtcacctgttgccggagagagtgtcctaaatgtgagttgtccagccaggatgtggcctgtatgctgcacctgctgttcttggtgtattgggcaaggaactgaacaaaatgccagtgtgggcacagatttattgaagaaaattcagagtgggattgggcttgagcaagcggctgctcaagagccccctcaattacggtttttattaaagaaaaaacccggcaacacctctcagtgcccttcagaggcctccaattgaccacacctcataaaggattggcctgagaccaatcggaggctgaagtggcttgttatcatgggagcaaggatgtggcctatatgctgcacctgctgttcttctgctcatttgaactggctgcacctgctgttcttccacccctgcggcactggctgcaccagctgaaaccctggttaccctaattccctattctcctgcctcatttccctctgagagatatgatccccataaatctttatgggaggcaaaagggctgaagatcagttttctgtagctactttctactggtcatgggcattgtccctgcctactgaggatcatggctctctattcctaagtatttaggtgggtatccatgggttgcggcaagccttgtacgtggttataaaaggtacagctggcttgatctagtcacaacaggtaagtattttggcctgattttgaattttgttccaaaattggctgaaacccttatacaaacatctgtaagtgagagagcaaaaatcagttaacattttacaccagggaaaattggtaggcatttacttatcttttgactgtcttttaaataggtagttcaggtcttctacgggttcacaggtatagtggctggtgggagtctccggttccaggtccagggcttcagatgttgcaggcttaaacctggaaagaggtatccaactatctaatcctagtactttggccatggaaggcatggccaacaccagtgaaaatagtcccttccattagggttgtagttgttgagcaggtgactcctcattccatgttttaacaagtaccttatctcctggcctgaccttggtttgctggttagttcctggtgcggggagcctttgagttccaaactcttgcgagacctgctgaaactgtcctaggttaactaggtattttattaactcagccgtttctggatcagtaattagatcattagttaaaatggcctcccatataacattttatatgggcttatattaatttttgctcttggagaataatggtttcttaagagggctatgggcagtaagttgatccaagtttctgatgtttcctgacatagcttagctaatgccagttttagagtttgattagccctttctactttccctgaggattgaggcctccatgctgagtgtaaatagtatttaattctgagagccttagcaaccctttgagttatttgggaggcagaagacaagcgattatcactttggaggctttggggcaacccaaaccaggggattatttccttcaagagaaccttgataaccgcattagccttattccgttctgatagggtaggcttcaacccagccagtaaagttgcttcattctctcctcgactccaactgtctttctggaatcaggtgcagtttgctcacagggtcttagagtaactgtcttcccaaatctcaccctcctttgtgatgtactcctcccagtcttttttttttttttaattggattctacttctttggatgatgcatgctggtgttttcaaaaggttcctgactagttgtgtcctttataaaataatctgataatattttagcttcttcctgaattttgtagcatatttttgagcttctgctgaacccatttttgagtctcatgacattttccatgtatggaattgtgccaatagaaacaaaatgtggtcatatagcctcccccaacacttcaaccaaactggtttacgtcagatcctggcagcttctgctgtcattggatctcagtgaggcctttgcacccattccctccctttgtgattcatccacggacatctctctccattgatttgagaaccatctcagcaatattccttgccttattccagttctcactccatctcactgcctgctgtttcctgtgaaataaagaaatgtcccacactttagagagtaaaacaaaaattggggcttagagagggtggacttgtcaagaagacacagagctgtgagtgtggtaagcccttaaaatgggctcaatgacatcgctgcctcccagggatccctaatgtctaagagtcccagtgagctgggatgaacccagggcccaagacgtgctgtctgaccctcccacctccaaaagcacacccagtgcacatggcatgaggcttccatggtgatggtaaagaaacgtcatctgccatctctcccattactgccgtgtcccgttactgctgagttgcctgtcatcccattctgtgctgagtgtccagatgtgatcaatagaatcaaggggaaatgttctgagaggaaagggcctggagtcagaccaggggctttgagcgctgagctcagagccttcaaacccggggagctcaacagcagtgccaagaagaatgggggacattggggtttgagtttatgtttggaagaatataagcatgacttggagactcctatgttcttgtgtccccagaaagcagagctaggagccgctggagggaagattggtgctagaagttcatgtgagaacagggcagacccctgcataaatgcggggcgggcggggcgggggaggtctcccaggcactgcgggtgtttgaatcaaggcccaaaccctgtggcaggagtactctcagggaactcaaacatttattttactagggctttaacatgaagtatcagttcttaagaaaatccacaacatgtgagtgaaaatctcatttaatcggctatgagatgttatacaggtggaaaactgggttaagtgttaaattgttatcaccaaattgttgcaacaaattaccaatgcagcaatcatgcatagctgtaagggctcaagtaatggagggggtggccagcaccctggcagagggagacagcacagaaggtctttgtgactcaggtcatagaatggaaaatggttttgtgggcagacaatgagaaaagggggacagagtagctgtgtcctgaaataaagcctcttaggtgttatttgaccatttgtttctccatgtgaatgtgtaactttgattttaaaaataaatagaaaagagcctctttcctgacaacacccgatccctgagccccacagatggtgttctggtttcttgcaggagtttctcttcccgcctgcctgctcccttttaggacaaacccaccagcaaggaggtcttctagctcttattgtgtgtgttctcctgctggtcctggctttggccccagggacctctgggttccctcagctgcacttccatccagcctcagtgcataggactctgtgcctgacctcctccaggcggggctgctgcccccaggtgtccagctggtacggagctcccgtggcagctctcctctgatgaccgagtgtgctggggatgctaaggctgacttgttgctggcacagccaaaccttctttgctgactgtttcaaagactccctaaaggctccacgtattttccttagaacacagtcctgagcagtcccacccatcctcttcccctctctcccccacactgggggtcacacttgcttcatggtctagtggcttacccagttttttctcattcttttcattatgtctgttccctcctaaaacccctgcaatttagttttggcgtctgtttctcagaggagctcggtaacagactccacactctcttctcccagtccctgctgcccctgtggcaaggtgggcagttggggacaacagagccggcttcccttgtccaaagcataagctattccttagcaaaatggagcgccgcccccgcagctaagggctgcatttctccttgttcctgctagtcacatccagcacatctgggctatcactcttgatggcaacattagattggggcccactgtggtcataacaggggtggaccaggtggcagagtcttcagtcaccatggaaaccccggcatccagtgctaacaggtattttagaatagaggctcagatgctcgcagatgcggccccaatcctccgccccctccctgcagctgctgggcaggcctcctgggctcatcactgccttctggcagggcctcagtggcagcttgctctggaaggcatcctgactctgggttcaggagcttgctgggcttctgcttgaaagtttgaggttagaatgtcaccttttctgagttacatttttctgctgcagattttggacatttcctgagggacactgaatacatgggagttgatggaggggaggaaggaggggctagaaggaaggaaagggctatcactgggtgggccctctgggacagggcgtagcgcagggacagtgctagggggacttcacacggaggaatgaggggtgggatgcagtgacatcacaagggtcccattatgacccctcctccatcagctaaggggggatgggctgagcctgaacagagggagaggggagtaaataaggggctgttgccagagcctgagcccaccagagaaagtctgtgtgcagagggagggcctcaggtcctgctgctccttcatcttgaccccttcacaccctcctctaacagggacctcgacctcccttctccactctcctggatcctgctcagtgtggtgcaggccttctctggggccctggagttcccactgaccttcagccccgccagttgcatctgctgttcccactgaaggttagtggacagggtggaggtggctaaaggtggaaaagatactttgtgagagggggaccccaacacgaggacagggcactgacggagcctttaccaaaatgctgggaaaggtctccccaccatccacatattctctcccaggcctcaaagggccctccccagtctccagctgtcagctttcccacctccaccttctctcctcctttcggttctgcttctgaatttcttcaaaaattctcctgcatcaagactctcatgctagtcagttcctgcctggggtcaccagactgcttcgaagtcaggaagaacatggtggggacggtgacttgagtttcctggaccacagtgcaggtgagaaatgcaccctacagagtgaaaaggcacagtgtcatcgtaaggtcattttaaagatggaacttagacaacagatgtcccataaatccagtctatgaggacaccacaaagactgtatcttttgcaaattctagaagagaggttgtactagattgggagaaagccctaaagaacaagatcctgtttcttgacacagtttaccctgaagatgctcactggccgagcacgaactcccaggtcgagcacaaacagccctcagagaggaggtggcactaacactctaggcgggtggctgctctttggtcttcttctgcctggagagctttgcctccatcactggtgaccacctggggaattccttagtgtactcaggggaattcctgagtgtacccttcaaaggtacactcggatgccccctctgcaaagacattttgttcccttactgtacctctgaaatcatttgtatccaagcatttgcaaatccacctgtcttctgtgtgtggctttctatatggcatatctatagacattgagggtgaaaagcaagggtaagactctgttccttttcttagggagctcacagttcactagatgagacagaaggaagccactgactctgaaagggaacaggatgtggcaaagatggggcagaggggtgagcacagaggggatcaagagaagggggagaaagaccactgtcatcagtgcagcctttctggggagcaatgtgtgagctgagctttggagaagaaatgaggttttaaagagtgtgggagaagagtcttccaaggactcttcttggaagaccaatgtcccctcctccctgccattccccctcctgcagctgttcccttcttccctctgtccttgctcagcacggtcacaacgactctccaaatcatgatgctcaaaacgccacatctaaaaagaacatccgggtaggtgcctctgcttcttctgacttggcctcccttccctgccctctttgtgtctcatgtagttctttcccctcacccaacctccaaactccctctacagcagatgaaaaaatttacatttccgaatccccatctgcttttgtatgatttgtatcctctgtgagtccacaaggtgaacatattcctcaattggttgtgattttttttttttttttgagatggagtcttgctctgtcacccaggctggagtgcaatggcacagtctaggctcactgtaacctccacctccccagttcaagctattctcctgcctcagcctcccgagtagctgggactactggtgcgtgtcactacacccagctaatttttgtatttttagttagatacaggctttcaccgtgttggccaggctggtctcaaactcttgaccgcgtgatccacccgcctcggcctcccaaaatgctgggattacaggcatgagccaccgtgcctacccagttgtggaattttttaaaacatctgcaacagactctgcccctaagaaagtaaattcagtcacctacaaagagaaaggaaagggacagccatctaccatttgactactgaatttccatctgcacctttcaatgtttactaggacttacatgaaactatgtttcaaaatacacctttctttttatttctgtcaaacaaaatacacctttcttccttgtatctgaaaaagttggcaccctctctacagaacaggagacgcacagttccaacagttattgtatacatcactgaccatattaatgactccacaaaatcaatcctgggtccaccaaacattctgttacctgaagcctaacttataaaattaaacttcaacaacatgaatatacaacaaatgaacagagagaaaagatcaaattggtgagcatataatataaatgtgtacgtattacaaagaaaaaatacagaaagctactacatatctgtttctgtaatttgtcatgaggctgtaataccattaaaattttttaattaattaatttatttttcaccacacttcttttgctttgtggattcaggccatgatggatacaatgacttcttcctttcattatcccctccatatttctcctgccctcatcaagaacctcaattcatctcaggtctttgtattttacagtgccctaaacctccattcccaaaggactaagtcctcaatcatcctgccgtcttttagtttagtacctttcccttaaactttacaactgaatgtggaagtacaaagaaccaccctaagaatcccctgggttgctaacatagccatcctttgacccacggggtagcagcaacccaattttttcttggaaatcagaatcattaacaccaaccagacagtcaagtaatcccttgtgtctgttggttcaataaaataaagaacctaagtattcaggtagaagtctcatcttccagtttaatgaagcaattgctgtcctctgatattaaccccctagggacaaattcctctaaatcatcagaactaaaaattgctgagacaaaatgcaaaaattctttaagtgggttactagatgtgattgtcaaaggagccacacttaattctattcttttttataaaccaacatattctgactatgggggagacagcaccatatatcttctaattcaaagcagattctgcatcaggtaaaacagaactccatccttatagggtgtcataaccaaatctaagccattccacctttcaattacgacagctgcttccagaagataggggctgtggtgagaacagaacttcctttgctgcgacatgaactgcttcctcagatgatggctggattcctgtgaatgtggataaagcattctgtcagtccacagatggtgttgctggcagaagcattacaggcaaggcaggcagctccatcatactccagggtcacccctgtaatgctgaggctgtccacttttgtgtattgccagcttactgcataggttcagctgtaaccaggtctaagtgttttcctcagtaaactggtcataaggagcagttcatgaggtcacaggcatggggtgaaggacaggacacaatgcaacaggagtttgtgtcaaaggaatctgaagtgcctgttatgaaatctactcatatattccagacctactcaaacttgatctcttatataccatgtccatttgatgatagactgtgcacatgcctgatctcttggcaaggtgagtttgtgacgggaagcattaggcattcagtatctaccaaggcctggtagcaagacagaagctgttctcaaaaagagaatagttatctgtagaagacatggattttattcaaaaattctagaggtcaaggtggtcattttcctattcatccttttgagaagctacatacatcaactgtttgccacacttaaagtatcattgggtctgttgagtcagaaggacaagtgatagagcagcttatactatagcctgaatttagagcagagccttctttgtcccaggtcccatgtgaaacaggaagccttacaagtatctctgtagattcacaaatgtgatacatgttgcctccaaaacccaaaaaggcttatcaagagttgtgcctctttgtggtaggtagtacaaaatgcagaagttggtcttttgccttggaggagatatttcggtgttctccagactactgaatccccaaaccttcactcaggtgaccagcccctggctttttgtgggtattatctccttcaatatggttcacatatgtcttattaagacatctaaagtacttgtaacttcctgctcatcaaatccaatcagcataatatcatcaatatggaccagtattatgttttgtggagtgtcaagacactcagtatttcttttctttctttctttttttttcttttttgagatggagtttcgctcttgctgcccaggctggagtgcaatggcgcgatctcagctcaccgcaacctctgccttctgggttcaagcaattttcctgcctcagcctcctgagtagctgggattacagacatgtgccaccatgcccagctaattttgtatttttagtagagacagggtttctccatgttagtcaggctggtcttgaactcctgacctcaggtaatctgcccgcctcagcctcccaaagtgctgggattacaggcatgagccaccatgtctggcttaacgctcagtatttctatagaccatgtcatggtggagaacagaatagagctaccctgtggcaatgctgtgaaggtatactgttagcactaccaggtcacagcaaactctttctggtggtccttgaaaattggtatgatgaaaaacagctttagctgagtcagtagctgcataccaagtttcaagggtgatgatgatttgctccagtaaagttgttatatctgagcctgcaattgcaatgagagtctctacctgatttacttaatgataacccacagcctctctccaaaactcatctaactcctgaacaggccaaactggtaagttacatggggatgtgacaggtatcaccacttcttttgagtctttgattgtggcattcattgatacaatttctcgagtgatgctttgcttctggtttattcttggtagggaggggaagttgcaagaactttcacttgtcaaatgtacaaaaaaagggcaaagcatgactgatttgaccagtaaagatacaaaagccattttttgatttagattgtttattatgtacgtagacgtagacactgaaaggaagaatagtcaaaggtgacagctccctgtggttcttgtcccccaaccacatccctacacacacacacacacacacacacacacacacacacacacatacacacacacgaaactgaaatgaaaggagccagatgactgcaagacaagttggagggtacccactgctgaggatccaattctgcaactctgttatgcaactctattctgaagagggtggggtagaaagcctcatacctcatcagaacccaagaggcaatatcagcctcttagcatatatacaggagtgggaaatggccttacagcagctccttataggcctctcaccctgtgttccaggaggataacagggtgttctgccaagagtcagattacctgtgatccgtgcctttacccagaaggcctgtgtggatatgtgcaaggttgtcagggtgcaaggtgggggcattcccctacaacttcatgcgccacctcctgcttgttcacatatgcagtgaagaattcttggtagcataggccaccattattacattctttaagtaactgtaaacgtatcagaccaagtctgttctgtttgtcttgggcaaaattagatgagagtgatcatgctattacattagtgcaatcagaccatagccagatgccacatctggagttaagccagtgaaatatgttactaacccaggtgcagcatgaggtgttatcaaccacacacctcccacactcactggccagcaggaagtccagggcaatatgattgtccattatcactcatgctacagagtttagaatagtcggtgaaaagcatattaaaaattctaacaacatgagtgtctgcaaagttaaccttgttcttccacgtcactggaagctatttcctggtgccaagggctattgggagggttctgattaagattctatgctggccagcagtggagggtggtggtggcactctgggttaaattggccagatgccctgcagacaactcccaccacccctgacactccagggcccaagatgttctctcctcacatcaaccagggttgctcttctccttgcacagctgggtggtcagtatgaccagtccttgcagcattcacttcactgtgtttgcagctcttcccacatctagccaacaccacacattcagactcatccttaagtggctcaggagtttcttccttatatactttgtaccaccctaaaaactctctcttccccactgatgcactgaggtccaccagaactaccttaggaattgccacctcatattcatgatcattatcatcaatgtccataactgcctaaattcagtaagcatagccagacagcaaaagatgtaccatattagagtcacctattctctggctcatttttgctactccgaaattccagtagctcagaagtagacacagaagatagtgcaagaagtgttaattatgtggtttgggaattttataggctgcctgggcctcctctgttccaatctgtcacaaattctatttaaatataatagaaggtaccatttcagggaactgccacattttttgcccaaagtgccttcatgatgattatgctccacttggtgcataggcttcactgttagttacctttatccgtttctctttaagggcagcacattccatcttttaatggctcctggcaccagggcagtacaggtctcctgatcagcttgtggatttcagtgatgtccattattgaagggtcttttttcttggcatccacaagtgtcacaaaccgggggttgaaatcttgtgcaatctgcaccataatatttgtcctcatggaagctacaacttgatcgtccagtcatctcatcaccagcaccacactgccaattccactgttgactgcccacaagtcagtgaattgtaacaaggtgcattttgggggcaggggggtgtttctagggcaagtgttggccggcaactccaccaactgagcagagttcctttttccatgcagttttgggcaatttcctttggggctccacagcagcagcagcccaatatcccccactggtcttgaacttagctgacccatctgtgaaccaagcccaggtatcctcaaggacttcagtgcactaaagtccccaagaagcccacggtgctggcacagatcctgtgtctgagacagccacatctagagggtgactaggcactttttcatgtagctgtgagatgccattaatgtctagtttacttctttcctggatgtaacacctccattagtaatggatgcttgtcgggcaatatccactttgttagacttctcatttctgccccaccccaggatagggatgttggcgtgtaacaacacgtactgttactcccgcttatgtacttgtgcctctccattgttctactttgtattttcttacagggaatgtcctttacagttaaacatagtattacatacacactctacatgtattcccacaatacattcagcattattaattacagccactccagtgtatattggcacaaaagggcccacccacaaagatatatcagcccattgttcagagttacttccaaatccagttaatttttcaaaatgggcatagacatttcttggcatgtccatgacttgtgaccctgtgtccagaagaattgacatgtttggcaaccttggttgccatcaagtctctgacacaccttgccgggcataaggcctcacgttttattatggactgaagttcctcagcctctgccctgatgcagtttattcttgaagagtttgaagtcagggtagaaggtggagttagatgcattagatacatccctgtcctcacagcacagacctcagcatggagattcaggtctttctggtcatcctgcagtttcttcacagtcagcaccaaagctgctcaggcatcttctcctgataactgctcagagctttaagtgtgtttgccctctcatggactgataagagagaatttccctcatgggaagttcatcagtatctgctctttgggaatcacctggcattgtagccatgtccacatggtcctatggtttggatctttggttagatttttcttcctccttatcctgaaggcatttcccttggtgcctggaaagggctcactcagtgggcctcggctgctcaaaccctgcatattccccagaaaagcctgtcttcaggactggactttggtgatttaggtcactcatattagacaaagacctgagacaaattgaggttctcagtgaggaccgggaaaatatggaatgggtagtgaaacaagaaaacaaacgtaccatcatggcctgattccacaaaataaaagaagcgtagtgaaaagaataaatatttttaaaataaatttttatattttttaaatatattttttaaaaggtgtcgtggcctcatgataaattacaaaatcaagtgtggtagtagctttgcatatttgtaatatgtacacattaatattatacgctcaccacttttatttttctctccattcatttgttgtatatacatgttgttggagtttaatcttacaatgtagtcttaaggtaacagaatatttggtggacctatgatggattttgaggagtgactaatatggtcagtgatgtatacaataactgttggaactgtgcatctccttattcggtgtagagggtgcaaacttctttacatacaaggaagaaagttctgttttgtttgataggaataagagttgtcacactgtttcatgaaagttctaataagtgtcgaagggtgcaggtggaaactcagtagtcaaatggtggatggctgtcctttcctttctctttgtaggtgcatgaatttactttctcagtggcagtgtgtattttagacgttttaaacattccataacgaaatatgaggaatatgttcaccttgttgactcaaaaagtatttagatcatagacaagcagatataggattcagagatacaaatttttcatcttctgtcaaaggagtgtggaggctggaaagaattacatccaaaagagaagggaggacgagtcagaagagggcagagaagggaggtcaattcagaagaagcagaggcaccaaccctgatgttctttttagaagtggcattttgagtgtcatgatttggagagtcgctgtggctgttccaagcaaggagagaggggagaaggaaacagctacaggaggaggagcagcagggaggaggggcattggccattccatactgctctggaaggctcttcttatttatttatttatttatttatttatttatttattcatgtttttttgagacagggtctcactccggttgcccaggctggagtgtactggtgcgatctcagctcactgcagccttgaccttccaggctcaggtgattctcccacctcagcctcccaagtggctgtaaccacacatgcgtgccaccatgcttggctaatttgttgtattttcagtaaagatggggtttcaccttttgccacacttaaagtatcattgggtctgttgagtcagaaggacaagtcatagagcatcttgagaccaccttgttgcccaggctggtctcaagcccctggattcaagctgtccacttgccttggcctcccaaagtgctgaaactacaggagtgagccaccacatccagcttccttatttcttctccaaagctcaactcacacattgctccccagaaaggttgcactgatgacaatggtttgtctcccctttctcttgatcctgtctgtgctcactcctctgccccatctttgccacactctgtttcctttcagagtcggtggcttccttctgtctcatccagtgaactgagagctccttaaggaacagagtcttactcttgtgtttcaccttcaatgtctatagttatgccacatagaaagccacacacagaagacagatagatttgcaagttctgggataacaaactgttacgaggtaaaaagtcttgactctgagttgtccaggctcatggggcattgaacaaagaatgaacaaaacactcagccaaagcaacaaaagagcaaagcaatgaaagaagcaacaaaagcacagatttgttgtgcacaaacaaagcaaaaaaagaatgaagcaatgaaagcacagatttattgaagcaaagtacactccacagagtggaagccaacttatgtaaagggctcaagagcgctgattacaatgttctttagggttttaagctattaataatttagcaacacccctaggtgccctttagaggcctccaattggttacaccctatgaaggacttacccaggatgaaacaaaaggctgaagtggaaacttctgttttgttataacaggagtgaggatgtggcctatatgctgtctagagctggctgcacctgctgttcttttgcttatgccttaaccgttgtttaccctaattccctattctcctctctcaaaatgatttcagaggcactgtaagggaacaaaatggccttgcagagtgggcgtccgagtgtacctttgaagagtaattcctgggaattcccaaggtgggcaccagtgatggaggcaaagctctccaggcagcagaagaccataagtcttaggtgtcagtgccacccacttagggtgtcagtgccacctcctctcaatgccattggtaccaatgatggtgccattgttgaaggctgtttgtactccacctgggagtttatgctcggccaggaagcttcaccggtgtaaactgtggcaggagacagggacttaattctgaggcctctctcccaacctggtaaaacttctccactagaatttgcaaacaagaaaaaaatgtggtatttgcagtgccctcataaacaggatctcaaagattctcccctcctcatccatcagatgccccaggctggagggtggccccagaagaacactttctagcccctgcctccctccccccatccacccccatctattcagcatccctcagaaaacatcccaagtttgtagcagaaaacagaagtgtaaatcagaaaaggtaacattcacacttcacaccttcatgtagaagcccagcaagctcttgaacccagagccgggatgccttccagagccggctgctgccaagaccctgacagaaggcagtagagggagggggcctgctcagaagctcaagcatctgatcctccattacaaaacacctgctagtgctgcatagctgggatttccatgacgactgaagacaagactgccaccttgtctactcctgccatggccacagtggtcttcaatgtaatgttgccatccaagtggtagcccagatgtgctggatgtgactagcaggaacgtgtgcaaaacatagcccttagcagggcccagccttactaagaggtcatgtatgctctgggcaaggccaggctggctctatggtctgcaactgtcagcctcactacaggggcagcaggaactgagagaagaagggttgaagtctctgttcctcagctcctctgagaagcagacgccaagagcagattaaactgcaagggttttaggaaggaacataacattgtgaaaattatgaaggactgggtgagccatcagaccttaaagcaagtatcagccctagtgggaaacagaggggaagaggatgggcgggactgcacagaactgtattctaaggaaaatccatggtgcctttagggagtctttgaaacagccagcaaataagttctgggcgtgccagcagcaagttggccttagcacccccaccacactcggtcatcagaggagagctgccacgggatgcccataccaggtggacacctggagggagcagccccgcctggaggaggtcaggcacacagagtcctaggcactgaggttgggcaccacggatggaagtgcagctgagagaaccctgaggttcctgggctccctggggcccaagccaggacgagcaggtgaacacacacagaaggaactaaaagacctccttgctggtggggttgtcctagaagggggcaggcgggtgggacccagaacctcctgcaagaaaccagaataccatctgtggggctcagagattggttggttttaagaaagaggctcctttctacttattttaaaaatcaaaattatacattcacaggtaacaaatggtcaaataacacctaagaggctttacttcagaaaacagcaactgtcccccttctttgccatttgctctctttgatctgagtcacaaggaccttctccagtgctatctccctctcccagagtgatggccacccactctgttacctgagctttgtatgattgcttcattggcaattttttgcaacaatttggtagtaatttgacagttaacctgttcttccaggtgtatggcatctcataacagagtaaattagattctcatatgtttccaattttcttaagaatcaatattccttatgttaaagccctgataaaatacatgtttgagttccttgggagtgtccctgccacggtgtttgggccgtgattcaaacagagagatcccacatttatgcaggggtctgccctgttctcacctgaacttctagcaccattctctcctctggcgacccctagctctgcttgatgggggcatatgaacatcaggagtctccaaatcatgcttatattcttcgaacataaacttggacccaaatccacccccattccccttggcattgctgccaagctcccaacacttgaaggccctgaactccttgctgaacagccctagtctgacttcaatccactctccactcccagagtctggccccctcccctcaggcctcaattttctcctgattctattgatcacatctggacatttggcacagaataggatgagaggggacatggcagtaatgggagagatggcaggtgaggtttctttaccatcaccatggacgcctcaggccatgtgcactgggtggggctttggaggtgaggaggtcagagagttcttcttaggccctgggttcatctcagctcactggaaccctcagacattaggaatccctgggaggtagcggtgtcattgagccccatttcaagggcttaccacactcccagctctgtgtgatattgacaagttcaccctctctgagctccaatttttgtttttactctttaaagtgtgggacatctctttattcccgagtgaacagcagaaaatgagatggagtgagagccgaaagaaggcaaggaatattcctgagattgttctcaaggagatggggatgtccgtggatgaatcacaaagggaggaaatgggtgcaaaggtctcactgagatccaatgacagcagaagctgccagtctaagatctggaccagatttgaagttttaggggagcctatatgacagcattttgtttctactggcataacttcatacatgaacaatgtcatagcactcaaaaatgggtttaggagaggcctaaaaatatgccacaaaattcaagaagctaaaatactatcagattattttttaaagacacaatcaatcagaaaactttagaaaacgccagcatgcatcatccaaagtaatagattccagttcaaaaagagagagagaaagacaggaatacagcagaaactcagaggtaagtgagatttgggaagacagttactttgtaggatgctgtgagcaacctgcacttcagtccaaaaagacagctggagtcaaagagagaatgaagcagaagttgcaccccaggcaaataaatatttggtgagaaaagcttctaatatcatctccaggaagatctggtcataaaatccttccagagagaggtcctcaaacccaaattcacttcttggggccaaacactgaaattggctgaacccctgtctacccccaccatgtttcacctgcaaggcttttctctcctttaaatgagatgagctaagaatggaacccgtgtttgaggatggtacttcatcttcacttgaccataacttgcttacacctttagggtaaatgtaatactttcaatacttttgctctctataattaaaaaccaaagcaaaaccccacaccaataacttcatcaagagattctcacttgggcattggacccattggccacatcaaactctgatctgtatactctggggggattagaatatgcccagttggtagagcacctgaccagctgggaaagcacttgcccttcacctcattccaccctcaaaacagagggtccaggaggacaaggactgccaaggtgctaagaagttctgtcacccaatgttgctccgggcagcaaattgtaaggaggagtagcactcaccaagagacctagggcctgccttggatccctgcacatagaacttaatggcagccctcagtgtactagtgaagacatttatcttattaaggagagaaaagaggcacaaagaagctggtcgaacttgcccaagatcacacagccagcccaaggcccagcttgctttgagctcaggcacccaactccacatcgtctgatacattctggttcctctgacttcttcccatctgaagctccctgctctgcgttcagatgccccctctgactcgctgctcaggaacataggcttccacagacagaggtaaggatatgaaccagccaggctggcaaggactgaatccaaatcccaggtttctctccaagtccaggcctttcctggcagatatgagcagcaagaccagggtagccacagaggcgagctcggctgggtggaaactccctgaatagccaagtgtgcatgggattcttccaggggacagcctggtcctgtcctgttccgggtaggaggcactgggcatctgggcactcaaaacctaccactgtaaagaagactgaaccagtaaggccacacgccgggcacggggccccattttcagaggatggagccaggcctgtcggggctgctcatgtgtccacctccttcaggctccctcattatccaaacggcatttccacacatgggaatttgcaaaaggagagagtgaaaggcccagggcatttctgtggtctgtactaaccctcaaagatactcttggtctgtgtgatcctcattttcaaattagaggctaaagatggacaaggccggtagcagagtgtgcaggtcgcctggccagccctgcatttactcctctctccaggcagagtggccagtgccacttgcccacgcagcagtcacgtgaggtccatcctctgggaaggtcctccctgatggcccctctgcgattctgaccacaggatgcccgcagcacagcagagtcccaggtggagcagaatcggccatgagaataagcttggttccgaggactttctgctgttatgtctgtaattactaaacttttttcatataattgcatttttcaaacatataaggatgacaaaaaaataatataacaggtaaacagaagtgccattttgcttccacggctccggcctcctaaggggcaggaaagcaggtgaccttattcctggtattaaaatggcatggctggagttcaggtgggctgatgggaagctgtgcatcctatagcaccctggaatggctgaaattaagtattttatatggcaaaattgactcatggagcagaaatagcctgctcatatggacatggaagcaagatgtccttcaggcccctaaacctcttctgagcctcttcgcctgcagatagctgggcaggcgtgtctgaccatcccatgtggccagggtccatcttcagcagttgtggattgaggcctttgtccttgtctgtgctgatttgagaggtactggagaaaggctgtggtgtcttggtcttcgtctccagtgttagccactgcaatggcagggggaggaggtggtgggctgagagcatggacagtgcaaaggcagtcatggctgattgctagagagaaagatgaaggagacattaactcttctcctgaagcacaaatcagaacagatatttttcacgtgttgagcatgtatgtgccccacctgggtactgggcagcatttctgattgaacactgccgcagtgcttgatgcaggtttacgtgagccccagtttcacgagggggtcccctctcctccctcccttggatgtctcatgtctccatctgcactcttagtggcctggtctttctctgagacaattccaggctggttcccctgctttgctatcccccacaacctctcccacaccattgcccagctcccaagagctcactgtggctgaggaaagggggtgccttgacacggagttcccttcacatgagggtccccagacattcctcctggaagtgctccaccaggacccctgccacatgtgcctcttggtgcagggaggagaggagagcaggttgtgtctgatgtgggtgtgtctgtgtgcaatggctgcttgtatccttgtgtgttgtgtacctgctcagcaaactgagtcctgtggccaagaatgatcctgggcaaaactgagcacatttaacccaagtttgatttcaactcaacactttcccactgtgcctccttctcatcccaaatgtgccaaatacttctaatcttagtattcattctttgctttgtctgtcaggtcctgttctctacgagtgaatatcctaatgaccataataaagccagttccctttttggggactgacatttgttgagaactccccctatgaatgctgtcttgctgcaaaacttcacctctggataaagtggctgtgctccttctggatgtctgcatcagggctgctgaggcacagctgagaatgcaccacacagctgactacgctgctgagcaaatctcattactaaatgcacatccctttcaaggatgccaggcgttagggctgcattgcaactttgatggacactggggattaatgcctgtgtgtccttgttccattaaaaagtttgaagtttgctgggtgcggtggctcacacctgtaatcccagcacttcgggaggccaaggcgggcaggttacgaggtcaggagatcgagaccatcttgaccaacacggtaaaaccctgtttctactaaaatacaaagaagtagccaggcgtggtggtgggtggctgtagtcccagctactcgggaggctgaggcagaagaatggcttgaacctgggaggaggaggttgcagttagccgagatggagccactgcactccagcctggcaacacagcaagactctgtctcaaaaaaaaaaaaaaaaaaaagaaagaaaaagtttgaaatttgattttatgagttactggtataatgataaatatattaatatcataggccaggcgtggtggctcacacctgtaatcccagcactttgggaggccgaggcgggtggatcacgaggtcaggagatcgagaccacggtgaaacctcatctctactaaaaatacagaaaaaattagccgggcgcagtggcgggctcctgtagtcccagctacccgggaggctgaggcaggagaatggcgtgaacccgggaggaggagcttgcagtgagccgagatcacgcctctgcactccagcctgggcgacagagcaagactgcgtcttaaaaaaaaaaaaaatcacatagttcaatttttttttcttctgactgaaattgacactctttggtgggcctgtaagtttcctggccctggtcactgtgcccaccctgcccatggctaaggggtcctagcagcaagcatgtatgtggctggcccctacaccctcccactctgccagagattttttccaaaaggaatctccctgcacggagggcggagctcgagatctccatgtcgcggggtggctccgaggtcaccactgcccagcatgtctctggctgctgacaggactctgtgctttcttaactccttgatggagttcctggagttggagggaagcgcttcccaccagaaacccacttgtgtcggtttttcttccattcgaaacaaatgatcaaagtgatagcgttttctatgttacgtgtctgtctctggtcacttaaaaacaaaacagagcagggtgtcccctgacagcccaggagaagaacaggaaggcagccctggggttacctgtcaaggttcagatcatgacctccgcaacggccacggctgggtgacatcgtcactccccaggggacaggcgatcccctcctcaccccacagctcagaccccaggatcggccccaatccctgtgtcctgagctcctcctacttcccctttccatcccagccagctccgaaggaggccggccctgtgagacagggaggggtccagcctgggacccggcctgagccgggagggagggcttgtcttgctccggcccctgtgatgagtcccctcttacccggcaggtggtgactccccatccgcggaggctcccccgctgaccccaagtccccaccgctctgtccttctccaaggcccggtgcaggagcaccctttgtccctgggtggcctgaccctgctgaccacgggtcacctccctgaccacgaatactctgccaactgcctcctgagtgaccgagacagctcagtctagagtctcgactacccggggtgacccaatagtcccgactccccgagacagggacccggagacgtgggctttgtcagtttaacagattctgcctccgggaaccaactgccgggagattctgattggctcagccgcgtgcccacgtgaccgaccaaaaccggccaccagggtctcccaactgcctgtcaaacgcacagccctgttgggcccccggagaggaagagccgagaaggaggccaggccgggggtcaggtggcttcctctatgggccctttaatccacctcacttttttatcttcttttttttcccagcagctttattaagttataattcacacacgatgtaattcgcccatttaaaatgtacaatgggcccggcgcggtggctcacgcctgtaatcccagcactttgggaggccgagggggcagcggggatgggggtggcgggtcacctgaggtcatgagttcaagaccagccttgccaacatggcaaaaccctgtctctactaaagatacaaaaaatatccaggcatagttgtgtgtgcttgtaatcccaggtactcgggaggctgaggcaggagaatcgcttgaacctgggagatagaagttgctgtgacctgaaatcgcaccacttcactccagcctgggtgacagagtgagaccctgtctctaaaataaaatgaaataaaatagaatatacactggttcttagtatagtcacagaattgtgcaatcatcggcaccatctaatttgagaacattttctatatatatgtagagaaaggggtcttgctatgttgtccaggctggtcttgaactcttggggtgaaaccatcctccttcttcagcctgtgcaatacctatgcttgcacgggtgcaagcatcagcattacaggcatgagatgcctcacctggcccagaacttagttttttactgaaaaatattcccttgtatgcatatatgatatttatccagtcatcagctgatggacttttgaactgtttccacttctgtttattatgaataaagctgctatgagcatttgtgtagaagtttgtgtagatttatgttttcatttctgcttatataagtaggagtataatttctgggtcaaagtataactgtgtagtttttgagaggaattgccaacctgtttcccctcttctttttttttttttttcttttttttttttttcagagatgtggtctcactctgtcacccaggctggagtgcaatggcacaaacaccactcactgcagcatcaacctcctgggctcaagtgaccctcctgtctcagctccttaagtagctgagactacaggaacatgccaccatgcctgcataatgtttttttgtttgtttctttgtttgtttgtttgtttgtttgtagagacagggtttcatcatgttgcccaggctgctctcgaactcctgacctcaggcaatccacccatcttggcctcccaattgctgggattacaggcatgagacacagcacctggccgccaatctgttttctaaagtggctgcaccatttcacattcccaccagcagtgatgagggttttttcctccatccttgctaacacttgttcttgtctgtagattttatcatagccatcctaaggggtagaaggtggcatctcattgtgcgtttgatttgcctttccctaatgactaatggtgttgagcatcatatcatgtgattattggcaatttgtgtattatctttggagaaatgtccatgcacatttttcactcatttttcacttaggttattttccttttgttgagttgtaagagttccctgtgtattctaatacaagtccctcatgagataaacaagttgccaggtttttctcccatcctatggcttgtctttttactttctgggtggtgttatttgaagtcaatttttttaaattttggtgaagtccaattttgtttttgccacttgtacttttttcttttttttgagacagggtctcactctgtcacccaggctggagtgcagtggtgcaatcatggcttactgcagccttgacctcctcagcttaagtgatcctccctcctcagcctctggagtagctggagtagctgggactgaaggcacatgccaccatacccagctaatttttttattttgttttgtagacacagggtccccttatgttgcccagactggtccaaactcctgcgatcaagggatcctcccgctttggcctcccaaagtgctgggattacaggcgtgacccaccatgctcggccacttttatttttggtgtcatatttacgaaatcgtggccgggcgcagtggctcacgtctgtaatcccagcactttgggaggccgaggtgggcacatcacctgaggtcgggaattggagaccagcctgaccaacatggagaaacctcgtctctaatacaaaattagcaaggcgtggtggcacacgcctgtaatcccagctacttgggaggctgaggcaggagaattgcttgaacccagaaggcggagcttgtggtgagccgagattgtgccattgcactccagcctgggcaacaagagcaaaactctgtctcaaaaaaaaaaaaaaaaaaaatcgcttcctaatccaaagtcacaaagatttatctatgtttatctatgttttcttcaaaaagctttatagttagttctcatatttaagtctctgatgcatttcgaattaatttttgtgtacagtttgagtagtaccagctactctggagactaaggtgggaggatcacttgagcccaggaagtccaatctagagtgagccatgattgagccactgcactccagcctggatgacacagagggaccctgtctcaaggaaaaaaaaaaaaaaaagctgggccgggtggctcattccctgtaatcccaacactttgttaggctgaggcaggtagatcacttgaggctaggagtcaagactaacctggccaacacggcaaaaccccgtctctactaaaaatacaaaaattaaccaggaatggtggcatgcacttgtcccagctacgcgggaggctgaggcaggagaattgcttgaaccccagaggcggagattgcagtgagcagagatcacaccactgcactccagcctcagcgagcatgagaaacagaataaataaaaagtttaaaaaatttttatgtaggtcccattttgatcttttccctgagtttattaactgtgtatgcatgttgctggagtttaattttataatttaatcttcaacagaatatttggtgggcccaggattgattttgtggagtcattaacgtggtcagtgatgtatacaataactgctggaactgtgggcctcctgttctgtgtagagggtgccaacttcttcagatacaaggaagaaagctgtattttgtttaatagaaataaaaagatgtcacatagtttcatgtaagtcctaataagtgttgaagggtgcagatggaaactcaggagttgaaaggtggatggctgtgccgttccttcctctttgtaggtgcatgaattctttcttaggggcagagcctgttggagatgtttttaaaaaatccctcaaccaaatgaggaatatattcaccttgttgactcacagaggatacgaatcatatacaagcagatggggattcagagagcaaatgttttcaactgctgtcaagggagtgtggaggttgggtgaggggaaagaactgcatgagacccaaagagggcagggaaggggggtcaagtcagaagaagcagaggcacctacccggatgttctttttagatgtggcattttgagcgtcatgatttggagagttgctgtgactgtgccgagctgggacagagggaagaagggaactgcttcaagagggggagcagcagggaagaggggcattggtctctccacatatctcaggagggctctcctcccacactcattaaaacctcatttcttcccaaagctcagctcacacattgctccccaaaaaggctgcactgatgacaatggtctttcacccccttctcttgatcccctctgtgctcacccctctgacctatctttaccacaccctgtttcctttcagaatcagcttccttctgtctcatccagtgaactgtgagctccctaagaaaaggaatagggccaggtgcagtggctcacacctgtaatcccagcactttgggaggctgaagcgggtggatcacctgaggtcaggagttcgagaccagcctgaccaatatgatgaaaccccatctctactaaaaatacaaaaattagccagacatggtggcatgagcctgtaatcccagctacttgggaggctgaaacaggagaattgcttgaaccctggaggcggaggttgcagtgagccaagattgcaccattgcactccagcctgggcaacaagagcaaaactgtctccaaaaaaaaaaaaaagaaaagaaaaagaagaaaaaagaaaagaaagcaagaaagcaaagaaagcaagaaagcaagcaagcaagcaagaaaaggaatcgagtcttgcccttgtttttcacccgcagtgtctatagatatgccatacacagaagacagacggatttgcaaatgcttggttaacaaatgatttcagaggtacaataaggaaacaaaatggctttgcagagtgggcatccgagtgtacttttgaagagtagttcctgagcattccccaggtgggcaccagtgatggaggcaaagctctccaggcagcagaagaccatagagcagccgcccacctagagcgttagtgccacctcctctctgagggctgaagtttccaggtcgaaacttctgtgctcgacctggaagtttgtgctcagcctgggagcttcaccagggaaactgtggcaggagacaaggtcttgattctgaggcctctctctcaacccagtacaacctctctgctagaatttgaaaaaaaaaacatggtatttgtggtaccctcagagactggatttaagggacatgtgttgcctaagtcccatcttcaaaatgacccagcagtgacactgttcctttttactctgtagggcacatttctcacctgcattatggcccaggaatctcaagtcaccatccctaccatggtcaccccaatttgaagcagcctggtgaccccaggcaggaactgatcatcaagggaggctggaggcaggaggattttaaaagaaatccaacagcaggaccaaaacaaggaaaaaggggaggcaggagggtggtcaactagagacccaggagaggattccaggatggtgggaagccctcacccagcaagactggtggaggccccatctgtgctctgcccctttcaagaggtttcctttgcaccaacacccacccccaccctggccactgacctgcaggaacagcagatatgactgtggggccccaaggcctgcgggaacccagggaccgagagaaggcaggtgttgggttgagcaggatccaggttagccggggagggacgtgggagtccttgtcagagaaggatgtgaagggattgggatgaaggagtccaggaggagcagcaggacccgaggccctccctctgcacacacccttttcctgctgggctcaggccctggcaacagtgccttatttatttcccccacccttgctcaggcttagccagtccttgctccaatgatgggggaggggtcacagtgggactcttgtgacatcactacatcccacccctcattctttcctgtgaaatcctcctggagccatctctgtcctatgccctgtcccagagagcccccctgctataatgcttccttccttccttctagccactgcctccctcgccccatccaccccccaactattcagtgtccctcagtaaacgtcccaagtttgcaacagaaaatgaaaatgtaactcagaaaaggtggcattcacacttcacaccttcatacagaaatccaagcaaagctcttgaatccagaatcaggatgccttccagagccagctgtttcaagacgctgctagaggcagtgaagagcgcaggaggcctgcctagcagctgcagggaggggcggaggattggggtcgccctctcagggagggcagaggagggttagaatgcatctgaccctgcattctaaaatacctgctagcactggatgctgcggtgtccatggtactgaagacaagactctgctgcctggtccaccactgttatgactacagtggcccccagtctaatgttgccatcaagattggtagtccaggccgggtgtggtggctcacacctgtaatctcagcactttggggggccaaggtgggaggactgtttgagctcaggagttccagaacagccttggcaacatggcaaaaccccatctctacttaaaaaagaaaaaaaaatgagccaggcatggtggctcacgcctgtaatcccagcacttcgggaggccaaggcgggtggatcacctgaggtcaggagtttgagacgagcctgaccaacaaggagaaaccctgtctctactaaaaatacaaaattagccgagtgtggtggctcatgactgtaattccagctactcggggggctgagacaggagaattgcttgaacctgggaggcggaagttgcagtgagccaagatcatgccattgcactccagcctgggcaacaagagcgaatctccatctcaaaaaaaaaaggcaatctagatgcactggatatgaccagcagaaacatggagaaacacagttcttagtggggtcaggccttgtgaagtagcagcctgcggtttggacgaggccagcctggctctgtggtcacccacagtcaaccccaccacaggggctgcagggactgagagaagggttggagtgtgttatccagctcttctgagaagcagacaccaagacaggattaaattgcaagggttttagtgggagatatacctttgtgaaaagagttacaaaagactgggagagccaccggaccatgaagcaagtctcactcccaatgtgagggagagaggggaagagaaggggtgggagcactccggaccacagttctgaggaaaatccagagccttcaccaactatttgaaacagtcaggcagcaaagtaggtctgggcaaccagcctggccttagcatccccaccacactcggtcatcagagagctgccgcaggaggcctggcctgatgcactacaaggtagatacctgtgaggagccacactccctccaggaggtcagccacagcatcctggacactgaggttggggaccacggatggaagtgtagctgagagaacccagaggttcctgggcccaggggcccaagccaggaccagcaagagaacactcacagaaagaactagaagacctccttgctggtggggttgtcttagaagggagcaggcaggtgggaccagaacctcctgcaagaaactagaacatcatctgtggggctcagagattgggtggtgtcaggaaagaggctcttctctatttatttttaaaatcaaacttatacattcacagggaacaatcaagtagtcaaaaaacacctaagaggctttatctcagaaaactgcaactctgtccccctttcctcattgcctgcccacaaaaccattttcctgtctttgagctgagtcacagaccttcttctgtgctgtctccttctcccagggtgatggtgaccccctctgttccctgagcccttatagctatgcgggattgctgcattggtcatttgttgcagcaatttggtaataatttgacacttaactttgttttccacatatatagcatcttatagaagattaaatgagattttaactcctggtgccgattttctccagaattgatatttatgttaaacccctgataaaatacatgttggagttctttggcactatccccaccacagtgttagggcctctattcaaacccctgcaatgcctaagagaccccacatttatccaagggtctgccctgttcccacatgaacttctagcaccaatctttcctccagtgcctcccagctgtacttgttggggacacatgaacaccaggaatctccaaatcatgcttatattcttcccaacataaacttggacctcattccccccgattccacttcacactgctgtcgagctcttaaggtttgaagcccctgcactcagagctgcagatccccccgtttgactccaacccctctcctcccggagtctggccctctcctcagggctcgatttccctttgattctattgatcacatctgtacatttagcatgaataagatgagaggggactcggcagtattgggagaggcagcaggggaggtttctttaccatcaccatggaagcctcaggccatgtgcactgggtgtggctttggaagtggtggaaccagagagccattcttaggccctgggttcaccccagctcactgggactctcagatattagcaatctctggaaggcagccttgttgttgagacccagtttcaagggcttaccacattcccagctctgtgtgatcttgacacgtccaccctctttttttttttttttatctttttttaatctctaaagtgtgggacatgtctttattccataagggagaacaacaggcaggtgggatggagtgagagatcggctggaggcggaagaaggcaaggaatattgctgagatagttttcaaatcaatggaggtggatgtccatggatgaatcacaaagggagggaatgggtgcagaggccttactgagatccaacgacagtagctaaaatatcagatttttatttttatctttttttttttttttttgagatggagtcttgctctttcgctcacgctggagtgaagtggtgtgatcttggctcactgcaacctctgcctcccagtttcaagcaattttcctgcctcagcctcccgagtagctggaattacaggggcccaccaccacacccgctaatttttgtatttttagtagagatgcggtttcaccacgttggccaggctggtcttgaactcctgacctcaggcgatccacctgcctcggcctccctaagtggtgggattacaggcgtgagccatcatgcccagccaatatcaaatttttgtttgtttgttttaagacagagtctcactctgtagcccaggttggagtgcaatgacgggatgtcagcttactgcaacctctgcctcccaggttcaagtgattctcctgcctcagcttcctgactagctgggattataggtgcttgccaccacacccagctaatattttgtattttttttagtagacacagagtttcaccgtgctggccaggctggtctcgaactcccgaccttaggtgatccacccacctcgccctcccaaagtgctgggattacaggcatgagacaccgcgcctggcctcaaatttttaaaaggacaaaaccagtgagaaaccttttgaaaatatgattctagaaaataaaggatgggaggagtagtgcaaaagctctgaggagaggtgagccctgggaagacagttgaagactctgtgagcaaccagcacctgagccaaaaaagacagtattgattctccagacctgagacaaggcaggaggaaatctgggcatagagatatagttctctaggccctatgctgcctctgatccctttcttcccaaaatcctacaaataggactctagtattgagtatacccagggccaccaggggactgtgaggcctagggagccagggtagagctggctgcttcaaaagacgagaagtcgtggggataaggaaagtggaaggacaacgcctcagtgtaaagtccaaaatcatgtacaagccccgttccatgatgttaatgtccttggccctttgatgataattacttagtgactcaacatgacactaaagaaaggaatgcaaacatcagtaaccaaaacgaggcccactaccctagaggcaaatatgagaaaatcagaaaacaagtcttcaagtggaagtgcctcagtgaatttacacttgttcgagcccacagagctaataccaaagcttcacttagaaaacctcttatgtcggagctggtaccattccttctgaaactattccaatcaatagaaaaagagggaatcctctctaattcattttatgaggcaaacatcatcctgatatcaaagcctggcagaggcacaacaaaaaaagagaattttagaccaatatccctcatgaacatcgacgcaaaaatcctcaataaaatactggcaaaccgaatccagcagtacatcaaaaagcttatccaccatgatcaagtgggcttcatccctgggatgtaaggctggttcaacatacacaaatcaataaacgtaatccatcatataaacagaaccaatgacaaaaaccacatgattacctcagtagatggagaaaaggcctttgacaaaattcaacagcccttcatgctaaaaactctcaataaactaggtattgatgggacgtatctcaaaataataagagctatttatgacaaacccacagccaatatcatatggaatgggcaaaaactggaagcattccctttgaaaaccggcacaagacagagatgctctttgtcagatgagtagattgcaaaaattttctcccattctgtaggttgcctgttcactctgatggtagtttcttttgctgtgcagaagctctttagtttaattagatcccatttgtcaattttggcttttgttgccattgcttttggtgttttagtcatgaagtccttgcccatgcctatggcctgaatggtattgcctaggttttcttctagggtttttatggttttaggtctaacatttaagtctttaatccatcttgaattaatttttgtatgagatgtaaggaagggatccagtttcagctttctacatatggctagccagttttcccagcaccatttattaaatagggaatcctttccccatttcttgtttttgtcaggtttgtcaaagatcagatggttgtagatatgcagcattatttctgaggactctgttctgttccattggtctatatctctgttttggtaccagtaccatgctgttttggttactgtagccttgtagtatagtttgaagtcaggtagtgtgatgcctccagctttgttcttttggcttaggactgacttgccaatgcaggctcttttttggttccatatgaaccttaaagtagtttttcccaattctgtgaagaaagtcactggtagcttgatggggatggcattgaatctataaattaccttgggcagtatggccattttcactttactgattcttcctacccatgagcatggaatgttctgccatttgtttgtatcctcttttattttgttgaacagtggtttgtagttctccttgaagaggtccttcacgtcccttgtaagttggattcctaggtattttattctctttgaagcaattgtgaatgggagttcactcatgatttggctctctgtttgtctgttattggtgtataagaatgcttgtgatttttgcacattgattttatatccagaatctacaatgaactccaacaaatttacaagaaaaaaacaaccccatcaaaaagtgggcaaaggatatgaacagacactgctcaaaagaagacatttatgcagccaaaagacacatgaaaaaatgctcatcatcactggccatcagagaaatgcaaatcaaaaccacaatgagataccatctcacaccagatagatggcgatcattaaaaagtcaggaaacaacaggtgctggagaggatgtggagaaataggaacaattttacgctgttggtgggagtgtaaactagttcaaccattgtggaagtcagtgtggtgattcttcagggatgtagaactagaaataccatttgacccagccatcccattactgggtatatacccaaaggattataaatcatgctgctgtaaagacacatgcacacgtatgtttattgcggcactattcacaatagcaaagacttggaaccaagccaaatgtccaacaatgatagactggattaagaaaatgtggcatatatacaccgtggaatactatgcagccataaaaaatgatgagttcatgtcctttgtagggacatggatgaagctggaaagcatcattctcagcaaactatcgcaaggacagaaaaccaaacactgcatgttctcactcataggtaggaattgaacaatgagaacacatggacacaggaaggggaacatcacacactggggcctgtcatggagtggggagattggggagggatagcattaggagatatacctaatgttatatgacaagttactgggtgcagcacaccaacatggcacatgtatacatatgtaactaacctgcacattgtgcacttgtaccctaaaacttaaagtataataaaaaaataaaataaaataaaataaaaaattaaaaaaaataaaagacagggatgtcctctctcaccactctcctattcaacatagtgttggaagttctggccagggcaatcaggcaagagaaaggaataaagggtattcaattaggaaaagaggaagtcaaattgtccctgtttgcagatgacatgattgtatatttagaaaaccccatcgtctcagcccaaaatctccttaagctgataagcaacttcaacaaagtctcaggatacaaaatcaatgtgcaaaaatctcaagcattcgtatacaccaataacagacaaacagagagccaaatcatgagtgaactcccattcacaattgcttcaaagagaataaaatacctaggaatccaacttacaagggacgtgaaggacttctttaaggagaactacaaaccactgctcaacgaaataaaagaggacacaaacaaatggaagaaaattccatgctcatgggtaggaagaatcaatattgtgaaaatggccatactgcccaaggtaatttatagattcaatgccatccccatcaagctaccaatgactttcttcacaaaattggaaaaaactactttaaagttcatatggaaccaaaaaagagcccacattgccaagacaatcctaagccaaaagaacaaagctggaagcatcgcgctacctgacttcaaactatactggaaggccacagtaaccaaaacagcgtggtattggtaccaaaacagagatatagatcaatggaacagaatagagccctcagaaataataccacatatctacaaccatctgatctttgacaaacctgacaaaaacaagaaatggggaaaggattccctatttaataaatggtgctgggaaaactggctagccatatgtagaaagctgaaactggatcccttccttacaccttatacaaaaattaattcaagatggattaaagacttaaatgttagacctaaaaccataaaaaccctagaagaaaacctaggtaatactattcaggccatgggcatgggcaaggacttcatgactgaaacaccaaaagcaatggcaacaaaagccaaaattgacaaatgggatctaattaaactaaagagcttctgcacagcaaaagaaactaccatcagagtgaacaggcaacctacagaatgggagaaaatttttacaatctacccatctgacaaagggctaatatccagaatctacaatgaactcaaacaaattaacaagaaaaaatcaaacaatcccatcaataagtgggcaaaggatatgaacagacgcttctcaaaagaagacatttatgcagccaacagacacatgaaaaaatgctcatcatcactggccatcagagaaatgcaaatcaaaaccacaatgagataccatctcacaccagttagaatggcgatcattaaaaagtcaggaaacaacaggtgctggtgaggatgtggagaaataggaatgcttttacactgttggtgggactgtaaactagttcaaccattatggaagacagtgtggcgattcctcaaggatctagaactagaaataccatttgacccagccatcccattactgggcatatacccaaaggattataaatcatgctgccataaagacacatgcacatgtatgtttattgcagcactattcacaatagcaaagacttggaaccaacccagatgtccatcaatgatagactggattaagaaaatgtggcacatatacaccatggaatactatgcagccataaaaaggatgagttcatggcctttttagggacatggatgaagcaagaaaccatcattctgagcaaactatcgcaaagacagaaaaccaaacgctgcatgttgtcactcataggtgggaattgaacaatgagaacacttggacacagggtggggaacatcacacactggggcctgtcgtggggtagggggatgggggagataacattaggagatatacctaatgtaaatgatgagttaacgggtacagcacaccaacatggcacatgtatacatttgtaacaaacctgcacattgtgcacatgtaccctagaacttaaagtataataaaaaaataaataaaaaagaaaacctcttatgtcttaaagttataagacaggatagaattggattggtatacactataccacataagcatctgagacctgggccaggtttcactgaagctttaggggagccttttatggtagcatttttaaattttggcacattccataaatagaaaataccaagtagctcaaaaatgggtttaacaggcaggcacagtggctcatgcctgtaatcccagcactttgggaggccaaggcaagaagatcacctgaggtcaggagtttaagaccagccttaccaacatggagaaaccacatctctactaaaaatacaaaaattaaccaggcatggtgccacatgcctataattccagctacttgggaggctgaagcaggagaattgcttgaacccaggaagcagaggtttcagtgagccaagatcacgccattgcactccagactgggtaacaagagtgaaactccatctcaaatacataagtaaataaataaataaataaaaggtgattttacaatcagctataggactccaacacatgctcttaaatgcaggtttccaataactttggagattgtgacattagaatagaagaaaaaaactttcaggactctcatggagagctaaatgttcatgaatatgaagcagaacaggagttaactacatgaactgaactaatggaagactaaaataatccttttatgactttttgcttaaagaattactaaccctttgttttgttttttgaagccaagacaacttttctgagctatttacagcttttaaaaattgagtaaagaatactcctgtaaacaaaatttggagtatatttctctctactggatttctccaaaatgtggaaactatttgtattcttaatttatagcaatatagttatctgcataagtgcaatgtgaatctgttttcttttttaacaggacacaattggagacactggttattttaccaaggctttgactggaatggttttctttgagatacaaacagactcctttaaggaatcaaagttgacttatagagccaataaaaaccccttgagaaaactggcctcatacctagtctatacagttcctgtacagggttcctaacctgtgataagtaaagaatatcagttcctagcaggcccggaaggcccaagttatattaggacctcaggaggagagaaatttactcaactcatacaggtatgtgatggcaaaaaaccatggctgggctcaaggctttaaagtcttatctgaggttcctcatggaataatgtttcatcaaagccaatataaaaaggagcctatatggcaaacagttattcttgctgtgctttatgcaaataatcagtataaaaagactaaagcttattttgcaaacaaatcagtcctatcgtggtctgtttttaataaaaatgaggactggagagaggaaaattatgttttaagaactatggggccgggtgcggtggctcacgtctgttatcctagcactttgggaggctgaggcaggcagataacctgaggttgggagttggagaccagcctgaccaacacggagaaaccccatctctactaaaaatgcaaaaaattagccaggcatggtggcacgtgcctgtaatcccggctacttgggaggctgagacaggagaatcacttgaacctgggggagcagagtttgcagtgagctgagatcacgccattgcactccagcctgggcaacaagagtgaaactccatctcaaaacaaaacaaaacaaaaaactatgactatggtacacctgttattagattctagtctcatcaattgtttttgagggtttttttctgcaatttagactgatcctgcttacttctgtgaaccaaccagtgatctctggctacagctcagatgaaataagaggcatgggtaatgtaaaaatctggatcaatattctaattccgggcacatattggaatcagctagcaaccccaggcacccaagtcttaccaggtatgacaatagccatgagctacctgggcatgttggcagcctcaggattttttgaagctgtcctcaccgacttatttcatttggacatctctacttgtcttaaaacccaaggagccatctatatttgtggccaatcagttcaccaatgcctccccactaactggaatgaaacttgtaccataggctatgtatccccagacgccttcatagtccctggcaatctctctcttccagcaccaatctacaggcatcctatcttgcccaaggtgaagagggctatccaattaattctgcttcttgtggaacatggcattataccctgtatggaaatcagaattgctggaatcacaaaagtctccttgatctatagccaactcacaaaggaaatagccgacaacattgaggctaaaattttaacaacagtgtaagaacaaatggactctttagcagctgtagtcctccaaaatctccaaggactatgatatgttaatggaagcacagggaggaatttgcttagccttagataacaaatgttgcttttgggtaaatgaattgccaaaagtacaagacaacatcagacaactcctatactgagcctctagttgatgggaacaagcatctcagggtttgttagattaggaagcaacatggaaatggttctctgggtttttccctttttaggtccacttgttaatctcctacttttgctcctttttggtccatgtcttctaaatctaatcacctgatttgtctcctctcactttggggctgccaagcgccagatgatccttggtgagggataccatctcctcaatgatcaagagtcacccttctacagaagatcagtagactgcccatcagtgggacacggcagaggtgaattccctgtctctgctagatctggctggatactgttttcatcagtctatggagtcaccctgccctgacagctagcaagaggccaaaacccacagaacaaccaccaccacccctctgccagcaggaagcggctacagaagactgaccttcatccattttttccagaattgggtctagaatctcgaggggggaaatgttacagtaggtagttagacagacatgagcagggaaggagaggcccccaacaccaccaggactgtcagacaaccatcaggtgatggttaggtggttgttaaactgtctctctaaaatactaattggtcacagctggcacaagggaacggccgtctcccaatagatacaaaacacctgaagctggtgattagctgcattagcagtttcctgataagatctcaggagttgggtgaatgagctcaagcatgcctactaagaggcaaaatggcagagtttaactggtatatgaccttcctctaggaacattccactggtaagtgaaaaacacttcaagtgagcatgcatacaacttcagtaaacacactgtgcatgcagaccctcccaagtgctggtaggccactctgcatggggatatcccaccccaagggaagaataagggaaagagagacacaaccctccagaatcatgccaatgtacaaaaccccaagtcaaagggcaatctctcaagtttcctgcttggcccttttccaagtgtactttacttcctttcatcccgctctaaaactttttaatagactttcactcctgctctaaaacttgccttggttgctcactctgccttctgccactcagatgaattccttccatcaaggaggcaggaatttagttgctgcagatccatatggattcaccgctggtaacagcatcatgaaagatagtcattttgatggaggaggaaggagagatgtattcctatcaatagccctacagttaccagtcactgagtaaaaagtgaagagttaatattaatgcaagaatccaaagtatttgcaaggaagtagaataggaggaacctgttttcactgggatgggggtggcgggcaaatgtccaaattagtatggccactttggaaaacagtttggccttatccaataaagttgaacatgcaactcttgccctgcaattccactactacatagcactttgcgcatgtgtcctggaagacaggtaaatattgatcaaggcagcaaaactgaaagcaatccaaatgtacattaacagaagaatggagaaatgatatgcgctacagccactacagtggaatactgcacaggctccatgctccaacatgcagaaaagtcacaaacaaggtgtggagatccagaagaacagtagggcataaaaagcttgcaaaactattccatgtaatctgtgcaaatacaaagaattgaagcagactacaaagaaaggcaattgattgaaaaacataaaattctggatagtggttgccaaggtgggtacagagaggtctgcaaaaataatcacagaagtttgtttctggagctgagcaatggctacactgggatgagttctggagttagttctctttctgcataacatatatgtgtttatatgtactttcatgttggctactgtatttctttttttttttagagacaaggtttttctctccatcgcccaggctggagtgcagtggtgctatcacaattcactgcagcgttgaccttccggacccaagtgatcctctcacctcaacattccaagtagctggtaccacaggtatgtgccaccatacgcgactcatttcaattttttttttttttttttttgagacagagtctcactctgttgcccaggctggagtgcaatggcatgatctcagctcactgcaacctccacctcccaggttcaagtaattctcctgcctcagcctcctgagtagctgggattacaggtgcgtgccaccacgaccagctaatttttgtattttttagtagagacaggttttcaccatgttgatcatgctggtcttgaactcctgaccttgtgatccgcctgccttggtcttccaaaatgctgggattacaggcgtgagccatcgcacctggcctaatttttgtattgttaatagagatggggtttcaccatgttggccaggcttgactcgaactcttggcctcaagtgatccatttgccttggcctcccaaagcgctgggattacaggcatgagccaccatgcccagcctcatttttttttaacctttattttgtagagacagggtctccctatgttgcccaggctggtctcaaacttttgggctcaagtgatcctcctgcttcagtctcctgaatagctaggactccaggcatgcaccaccataactggctacttttattttttggagagatgagggtcttgctctattgcccaggctgttctcaaactcctggtctcaagtaatcctcctgcctcggcctcccaaagtactgggattacaggtgtaagccacttctcccagtcctatattttattttttttttaatggagaaaaaaactcacagacagagaccttggcttcccatgataattcatcagaacctggaccacagtgcttcttcatctttctctagacaagctttctgctaaaatcaacttaggaaaaacttgccacattcagacataaaagttagcaagaaagaatgacctggagagaagtacaaaaatcatacaaaaagaagaattgaaaagaaaagaaaaagcaaagcaaggcttatggagaacattcaccagaaaagcactgccatagccttgacaacatggcaaaaccccatctctacagaaaatacaaaaattagccaggtgtagtggtgcatgcctgtggtcccagctactcgggaggcctgagcccaggaggcagaggttgcagtcagccaagatcatgccactgtgctccagcctggggcaacagagcaagaccctgtcaaaaaaaaaaagaaaaaagaaaagaaaagaaagagaggaagggagggaggaaagaaggaaggaaggaaggaaggaaggaaggaaggaaggaaggaaggaaggaaaagcattgccttagagcaaagacaactgtgacccgaattgttgcaacaaattatgatgtaataatcctgagatctagccacttacagaacagaagggaagacagcaggctgccttgaaatcgagctggcagatgtgggtcattgggggatgggtataatatgagagaagctccttgtggctcagctcagaaaggtttgcatgtgtaataccaattattccggaggctgaagcaggagcctcgcttgagcccaggagtttgaggctagcctgggtaacacaatgacagcaccccttaaaaaaaatggctgggcgcagtggctcacacctgtaatcccagcactttgggaggctgaggcgggcagatcacctgaggtcaggagttcgagaccagtctggccaacatggtgaaaccccgtctctactaaaaatacaaaaattagctgggcgtggtggtgcactcccagctactcgggcggctgaggcaggagaatagcttgaacctgggagatggaggttgtggtaagctgatattgcaccactgcactccagcctaggcaacagatcaagactctgtctcaaaaaaaaaaaaaaaaaaatgagacagagaggagaaaatggcatcctggccgggcgcggtggctcatgcctataatcccagcacttttggaggccgaggcggatcacctgaggtcgagagttcgagaccagcctgaccaacatggagaaaacccatctctactaaaagtacacaattagctgggcgtggtggcgtatgcctgtaatcccagctactcaggaggctgaagcaggagaatcgcttgaacctgggaggcggtggttgcagtgagctgagatcgctccatcgcactccagcctgggcaacaagagtgaaactctgtctcaaaaaagaaaagaaaagaaaagaaaagaaaagaaaagaaaatggcatcctaaggggcaggtactggggacaggcaaggggaggaatttgccgtttcctgaaataaaacctcttagaagttgactgttcaattcatgcaaaatctgaataagatatcaaaatgatagaaaggaacctctttcctgatcatcacccaatgcctgtcacacagcacccggtactgagagacgctcctcccccttgtcctgctcccttctaggacaccccaccagcacaaagttttccattgtcaaggcccatgtgtgtcttcctggggctgatcctagtgttagaatcaaggatacaggaacgttctcagcccccttagccatgactccacctgctgtcctcccagtgtcctatattcctcaggctcagagccccaggccccagcacctcacctttctttgttgaagtccccaaggcctgaccattcacctggggactctgctctctctgttcctgctcatcacatctgggctgtcaacctgtggccgtgttacccaatctgagcctcaggtttgtctcttgtgcaaacttaggacagggaatagaataggctcatgatggacaggcggaggtgagatggggtgagagaaacgcaagagccaaaaggaggaaaaaactcaacgaaggggttcctctgagactgagaggtaggcaaaggcaggttgagagtcagttcccggactcaagtacctgagggaagggcagtgaagtcatgaagatccctttgtgacaccaacataccaggaggtaaagccagagactggccaggcaggctcagaaaggaataaaaggccagttgcttggcaaccaaactagaacagcaacagaaagatcggaggaaaatctccaaagcacttagaaactagccaatgtatgctaaataatccatggatcaaagaggaagtctcaaaggaaatttttaaaatagaataaaacgaatgaaactgaaaacacaacataccaaaatttgtgagaacagttaaagcaaggctaagaggaaaatttgtagcactaaatgcatacctcagaaaagaggaaaagtctcaaatgaaaaacttaaactctccttcaagaacttagaaaaacgaccaaatacagtggctcatgcctgtaatcccagaactttggaaggctgaggcaggagaatcacttgagcccaggagtttaagaccagcctgggcaacacagtgagatctcatcaatatttatgttatttaaaaaaaagaagaacttaaaaaaagagagcaaaataagcctaaaaccagcacaagaaaggaaataataaagagcagaaatcaatgaaatgaaaaacagaataacattagaaaaagttggtggagtcaagagtgtgttctttgaaaagatctgtaaaactgaccaagctctgacaagactgacgaagaaaaaaattactaatatcgcttatagattttagaaattatagtacacagttaccaatatcaggagtgaaacagaggaaatcactacagacgctgcggacatcaaaaggataacgaaatgctacaaacaactctgcatacataaatttgataacttagattaaatggaccaattccttgtaaagtacaaactaccgcaactcacctaattgaaataggtaatttggatagctgcataactattagaaaattgaatttttagttaacttcctgaaaaagaaatctccaacccagattgtttcactggagaattctattaaagatttaaaggggagttaagaccaactctacagaaaatagaaggaaaaggaacccttcccaactcattccagaaagcaggtattaccctcataccaaagccagacaaaaacagtgtaaaaagaccgggcacagtggctcacgcctgtaatcccagtactttgggaggctgaggcgggtggatcacctgaggtcaggagttggtgaccagctttgccaacatggtgaaaccctgtctctactaaaaagacaaaattagctgggcatggtggcacctgcctgtaatcccatctacttgggaggctgaggcaggagaatcgcttgaacttgggaggaggaggttgcagtgaactgagccgagattgtgccactgctctccagcctgggtgacagagcaagactccatctcaaaacaacaacaacaaaattaaacatgcagccgagcacagtggctcatgcctgtaatcccagcactttcggaggccaaggtgggagtattgtttaagcccaggagtttgagaccagcctgggtaacattgggagaccccctatctctacaaaaacttttaaaaataagccaggtgtggtggcctcccagctgctctggaggctgaggaaggaggattacttgagcccacgaattagagacaaccgtgagctatgatcatgtcactgcactccagcctgggcaacaaagcaagaacccatctcagaaagaaaaaaaaaaaaataaaagctaaacatgcaactaccatatgacctaatacttaactgttctcggaattagccaacagaaatgagaacttagttcacacgaaagcccgtagacaagtgtttatagctgatttatgcataatagtcccaaactggacacaaccccaatgcccttcagtgtgtgaatgtccagagcagcctggggactgacactgccacgctcttacttggaatgtgtgtagctttccagagaatgagttaaggtgtgtgttgaggggctgggagcgagcagtgctggcacaccagcagaactgaggagttcagtctagagttggtacatcttgagctgaatctctaaggccttcagtttcctagatctgcttccctcggaagcacttaggaaacagggcctccctccacaggacagccccccgggtctgcaaaggggcatgtgtttcctccttaggcacggatgtgccttgtcctctcttctcccacacttagagtaacctgtgaataatttgatgggtgaaataacccactgtctgggacaccatttttggtgtggctttatgggtgcctatgtaccgtgtatatgtatgtaacatgtaaccctgctcaaaaaggttagaactcacccagtcagctagcgactccagaataatcagatacatgttcccccaaggtaccacaagatggcagcacatgcacacagcatttcaagctcctgcacactgagatgacagcaattaatctgccctctaataatgcctctgccatcctggaaagccctacacttaaacggtcatgatgcctgtttctatgatgatgtgttgcaaacacacgcagcatttctgaggtagatgaagagattcaaagggtaacaggagattatgtagttcagaattcttcacctttttttaaaaaaaatatttatttatttatttatttatttttaatagagacagggtctcactatgttgcccaggctagtcttgaattcctgggctcaagcgatcctcccgcctcggcctcccaaagggccgggatcacaggcgtgagccactgagtgtggccagaattcttcaccttttggtgcagagtgtgtatgtcgcacctgaagccagaagtcaacgatactcgatgaaagggtttgttcagcgcagatgacctacttgggttcatggcttgcatgtgttataattgctgctgtttatttcctgaaaacttagacgatttggggcacattatcgatgccttacaggcatggtcgcattaaactttactgcagccatctgtcatagtgattattatcctcattttacagatggggaaagaaagaattagaccttcaggcaccttggtaatggcacgcacagcgagtagaggcagagagaacctgcttccctgacggcccacactcccccggcacacaaggctccctctaggtggcgcgcgcgtctcagcttctactgcggaagtctcggttatgtgattatgtatacgctcaatcctacaccaattgagaatggcccttagcttggaattagtaagaacagtaattagcaatttattgtcagaaaaaagttcataagattatcggccgcagtctctttgctgcacatctttctcatcttgacaggacagccacagggaatccaggtcttctccaccaccccaggctcagcagttcatgcttacccacccagctcaggcacagatgcgacattcagcttagcaacattcagcttaggatcgggtaaacaggcagagctttctctctctcttttttttttttttttgaggcagagtctctctcttattgcccaggctggagtgtaatggtgcgatctcggctcaccacaacctccatctcccgcgttcaagcgattctcctgtctcagcctcccgagtagctgggattacagttatgcaccaccacacctggctaattttgtatttttagtggagatggggtttctccatggtcaggctggtctcgaactccagacctcaggtgatccaccggcctcggcctcccaaagtgctgggattacaagcatgagccactgcgcctggcctttttttctttctttctttttaatgtggaaaattccaaatcctatcagagcatatttggcatgtgattttttttttttttttttttttttttgagacagggactcactctgtcgcccaggctggagtgcagtggcacaatcacggatcactggagcatcaaactcctgggctcaagcgatccttccacctcagcctcctgattacctaagactataggcaagcaccaccacagcccctagtttttatttttattttttatttatttatttttttgtagagacagagtctcgctttgttgcccagactggtcttgaacttctggcctcaggtgaccctctgggcctcccaaagcactgggtttacaagcatgagccaccatgccaggcctaacatctctaattttttaaaattgtttttaacataatgagaccgagcttcaccatgttgtctagactgttctcaaactcctgggctcaaatgatccacccaccttggcctcccaaagtgctagggttacaggtgtgagccaccgtgcccagccagcatctctaatttttgacaagcagacttttgatatgtgatttacctaagttgtgtaaagttatattcaacgttatctgccttttacaaatcaggaaaacagggtatcattaactttcctaagtgatatattcagggggaaaatgaatttagcaaagtggaggtcttttgtgtccttttacagatagtaaaatagcatctaggagaatgggaggttgaagggaactgtcatagatttggggtcaactgaggccagttagtggccatgaccatgagggaccttaggtgctgcttgctttccccagccaggttcagctgtgtgggtgcagattcagacttggaggtgagatgaaaataataagagggatgtgatggagcaagacagggcaagggccttgagcacacacaaggaagagattccagcagctgacagtctcattacagctggcagggcagtcagtgagagcatgagattaggtggatcatgagcagagaagctgggatggatgcactggtggcctcagcacagggagggtgccagggggagtgaacagtggaggggaatgggactcatgtcatttccgttatggaaagggtgtcgctatttgataggagagctctgggatatgaccatgggaatgaaaggctggggagatgacaggatcactggcaggaaactgagaggccagtattttggaaatattatttacaaagctactgatatcaccaaggacaggaaagtgttagagaaagtggcaatgattcagaaagtgaaatctccaaggaagaatgtttgtacccaggctttggtagatgaaggtaaccacagggtgtgggagaaacagtttgttatgggaaggaggaagaatgttccaggaaagcagcaatgactggcagaaaagacactcaccccacccaccccaccctcaagcccacagatactcaaaaagcacagggaagaaaacattcccgttttgagagagcagtaggggaagtgtggtttcacacagagctgcaaagtccattgtggcagccaccaaccacatgtggctaccaagctcttgaaatgcggctcctgtgatcagggactgaatttttaattgaatttaattcaaattaactagaaactgaggcagtagaaaatatttttctgttaatcacagctttattggtttggtaggacttcatttcactttaaccattgaaaagccaaactggccaggtgcagtggctcacgcctgtaatcccaacactttgggaagccaaggcaggaggatcacttgaggccaggagttcaagaccagcctggacaacatagcaagatcccatatcttaaaaaaaaaaaattaggcccggtgcggtggctcacacttgtaatgtcagcactttgggaggccaagtcaggcggatcagagttcaagaccagcctggccaacatggtgaaaccccatctctactaaaaatacaaaaattagccagatgcagtggcacgtgcctataatcccagctacccgggaggcagaggttgtggtgagccagcatggcgccactgcactccagactgggctacatagtgagaccccatctcaaaaataaataaataaataaataaaataaaactaataataataaataaataattagttgggcatggtggcatgcttctgtagtcccagctactcaggaggccgaggcagaaggatcccttgagcccagtagatcgaggctacagtgagctatgaccatgctactgcactcttgccttggtgacagagcagactctgtctctaaaaaaaaaaaaaaaaaaaagaaggggtcttttccattctgtcttccttccaccagagacctacacaccaccatttgtgctgccaccatgtctctagtgatccctgagaagtcccagcatattttgtgagtactcaacaccaacattgatgggcatcggaaaatagcttttgccatcattgccatcaagggcgtgtgttgaagatacgctcctgtggtgttgaggaaagctgacattgacctcactgagaggccaggagaactcactgagcataaggtggatgtgtgatcaccactatgcagaatccatgccagcccaagatcccagactggttctcaaacagacagaaagatataaaggacggaaaatatagccaggacctggccaatggtctggataacaacctctgtgagaacctggagcaactgaagaagatttgagcccagagagggctatgccacttctggggccttcatgtcccaggccagcacagcaagaccactggccgctgtggccataccatgggtgtatctaagaagaaataagtttgtaggccttgtttgttaatagtttatatacctaaacaaaataaaataaaaatttaaaaattaaaaaaaagtcaaactatcatgtgctctacacataaaatacacaccagattttaaagacagtatggaagaaaaaagatgtaaaataccttttaacatttctatattttctgcatgttgcagtgttttgggttatataaaatatgtttttttgtgttggatttattgggctacataaaatatatagttgaaattaatttcacctggttctttttacttattttaatagggctactagaaaatttagctgggtgaggtggttcacacctgtaatcccagcactttgggaggccaaggtgagtggattgtttgagctcaggaattcgagagtaccgtgggcaacatggtgagatcttatttctacaaaaaaatacaaaattagctgggcatgatggcaagtacctgtagtcccagctactcaggaggctgaagtgggagaatcacctgagcctgggaagttggggctacagtgagctgtgatcgtgtcactgccacaaaacaaacaaacaaaaagaaaagttagaatacatctagggttgcattatgtttctattgggcagtgctagcctagagaaagaagatgaagggaatgtgtagagaggagaggtggatgaggacatttagctgataattcaccaagcagcacagaggaaaagctgcaggggatggtgagagctggaagaagggctcagagaggcagaagcacaattgtatgggacaagtgtctcagggctgagggatctccagggagtcctggggttttcgtggtgcctggaataagcagagatcagagttataaagaagttaagtcctgattttctccgtggtgaccaagtagtgaccagaagcagggaggaggtccagttctggccagagattccaattcatgctggagaaaagaaatattttgaaagaagcaccctacaggatttgctaatgaatcggaggttgggaattaaagtaaaagaatcaagggtgggccgggtgcagtggctcatgcctgtaatcccagcactttgggaggacgaggcatgcagatcacttgaggtcaggagttcgaggccagcctggccaacatgacgaaaccctgtctttactaaatatacacaaattagccaggcgtggtggcactcgcctgtaatcccagctactcgggaggctgaggcaggagaatcgcttgaatccaggaggcggaggttgcagtgagccaagatcgtgccactgcactccagactgggtgacagagcaagactctgtctcaaaaaaaaaaaaaaaaaaaaaaagaagcaaaggtgactaaagatttgacctgagaaactggaaggatggagcgcctgttatgtggaagaccgcaagtaaaatgtttgagaagaaggggttgcacatgagttcatactgggatatgttaagtttgagagacctgctagaccacctgctagattctgagtaggcagttgtctaatagggatctgcagttcacaggagagatgaggctgcaggtataaatctgagggtctataccacatagatggtatttaaagctatgcaacttgacttctgaaattaaaagaattatagatcaatccacagtcatctccctgtcgcttgctgaataacaaaggcataactaacagctaattgattcttaagggtgcatttttttgcagatgtatatttctatagacatttggctcaatctaatattacagtcaatgtgtatgccctagacaaataccagctgacagagtataagaattcagaagccagactggggtttctacattccataatgtggaaatcctatagcagctactcatcaaaagctttctaccctctgctcacaagttgttcttgcctcattgcagacatttccctacatacctagaattttgtttacgatgaacagaatgttgggtaagagtctcttgagctgaaacagttacacccccgcagctgggaaaagctattccctctgcattaggccaacgggtgagtaagcaattctctcatctagacccacagcatagagaaccctgtacagaaattacccaacaacatacactgaaaaaataaaaaggtagtggggggaaattgtgtcaaatgaatccttcttctcctttgtagctccttggttagctaagaaaacacgaataaactcttcattaccactgtttaaccctggactggttctgctttccacttccctcaggaagcccacacctcctgatacaacccataccacggttgccttcccctcctggatgtcacagagaaggatttaaaaatgactcccggccagcatggtgtctcatgctcagcacattgggaggcctagacgggaagattgcttgagggcagcagttcaaggcaagcctgggcaacatagggagaccctgtccctattatttttttttttgatgttaaaaaaaatttaatttaattaaataaaaatggttcccaagtcaaagagaataaagaaccacagaagttaggtgttagatggtcatcactgaattactgattttactgacaaggaaattgaaacccagagaattgaactaacttgctcaagctcaaaactggttaggagcagattcagaaccagtgccctggcgctcccctacttttttttttttttttttttgctttctcttttaactttttgttagggaaaattttaaacacatgcaaaggtaggcagaatagatactcatcactcagctacaattataacaattaccaacaagttgccagaatccttttatctatcctctcttttttgtaccggattgttttaaagcaaatccaagatacttgaacttctattaaatgggatggaaacaaataaaaggcaaacactttttaaaatccaagatactacatcatttctcttgtaaatactttagcatgcttctctaactgataagaatattttaaaaacacatgccatcaaatacccaataaagctaacacccaataaagctaacaacaatccctttaatatcacctactatctgtccatatatatatattttttttcttttttgagacggagtctcgctctgtcgccgaggctggagtgccatggtgcgatcttagctaactgcaacctctgcctcccgggttcaagagattctcctgcctcagcctcctgggttcaagcaattctcctgcctcagcctcccaagtagctggaactacaggtgcataccaccatgcctggctaattttttgtactttgagtagagatggggtttcaccgtgttagccaggatgcatatttatttatctgattatctcagggtatctttttacaattggcttgtttgaatcaggattagaaaggtccgtaggttgcatttggttattgtatctcttaagtctcttttattccatagcagtcttacatctctttttgtttcaatgccattgcttttttggagaggatgaatcaattaccttctagaatattccgtgttctgagtttggctttttgctccctatggtgtcatctgcatcctatagtactctgtcccctgtattccctgtacattggaaagtcagatctaaagccttgttcagattcagctttctagggaagaagaattgataagagatattgtgcttttgctatggctacccatctggatggctcattgctatgtttggtgatgctagggccaaatgctcagcaggttcaggtgtggtgagcctgatctcttcatcataaagttccctgtaaacctttcacatcgtggttctagcatctcctgatgatcattatttacattcattgtttcattcatgcctgcaagatgattttttttaaaaattctatcattccttttgcttctattatagaattcttctataaaggaaaacttttccttatcaccgacttggtgtttttgaaatacagctgatgcggggcacagtggctcatgcctgtaatcccagtactttgggaggtcaaggtgggtggatcgctttgagtccaggagttcgagatcagcctgggcaatatgtcaaaaccccatctctacaaaaaaattacaaaaggtagccaggcctggtggtgcatgcctgtaatcccagttagtcaggaggctgcggtgggaggatcacctgagcctgtgaagtcaaggctgcagtgagccatgattgcaccactgcactccaggttggtcaacagaatgcgtccctgaagaaaggaaagaaagagaagaaagatgaaagaagggaagggaagggggaaggaaggaaggaaaaaagggaaggaagggagagagagggaggaaagaagcaagggagctaatatagaaaggtaggataaatgcttgattctgtccctttatttctcaattgtcaaagaactgacctattccctggaaaattctagtggtgacaaatgcggggggtcttgctgttgcttcattttgtaattttgtcattatgatatgtttcagtctattgtaaacatctgttttggtgctaaaacttgtcccatcataggtgagtcggttctgggttcctttgacttcatcctattagtgtttgataccttccttgctttcgacatgataagcggtccagtgctcacctcattcatgccctgccctagacctgtgaaaatctattttcctgctggtccagagtgactcatgtgccattccacagcctccctgttcgttggacttatttgggtcaccgttgctggcaaagagctgtggtcattagaagttggttttattaggccgggcacagtggctcacacctgtaatcccagcactttgggaggctgaggcaggtggatcacaaggtcaggagttcaagatcagcctggccaacatgatgaaaccctgtctctaccaaaaaatacaaaaattagccgggtgtggtggcatgcgtctatgatcccagctactcgggaggctgaggcaggagaactgcttgaaccccagaggtggaggttgcagtgagctgagatcgcgccattgcactccaacctggggaacaagagcaagagcaagactccatttgaaaaaaaaaaaaaacttggttttattggccatgcatggtgactcacgcctgtaatcccagcactttgggaggctgaggcaggaggatcgcttgagcccaggagttccagaccagactgggtaatatggcaaaactccatcgctacaaaaatttttctaaaatcagctgggcatggtggcatgcacctgcagttgcagctacttaggaggctgaggcaggaggatggcttgagcccccggcaccaaggctgcagtgaaccgtgatcatgccactgcagtccagcctgggtgactgagtgagatcctgtctgagagagagagagagattgagagactgatgctcaaacagagattcacacaggtggaggcaggattccaatgcattgcatgttgcggctgttgagcttcatgagggggtaaccacgtgctcaccactgagcctccagtgcctagccatgacttggtgaaattctgtctagtaggtatctctgcgttatgtaaaatcatgagcaattcctgtaccccaaatagtgccccacagggaaactgggaactaaacaatacaagctatagcacttccctgcccatacttgagctagtccagtacaggattcactgccagagtcacagcaaaggagtcatagcgtctgcatttttgccatcaatagtcattggcttccttatttcctaatgtttcccaaacttaaaaatgattagttacaagaggtataaacattttggggactcctctttgagccaaagtcatctcactaagactctaccaatgtgctagtggagttgttggtccagactccacacactttggtgacaaccatgaaatgctttcagaggggaaggtgggtggcacgcacctgtagtcccagctaggcatggtggcatgcgccgtagtcccagctacttgcggggctgaggtgggaggactgtccaacacatggacattggggaatcttccaagacgcacctacaaattcccagaagggaccagctgggaatttatgtgccatgtgcatctctgggatatttcctaaaagaagagaggctgaggcatggtgcacaaattctgtatctctggcagagtcctccacatgaaactgcctttgcaaaattagacagagaaatctaacatagctgacttcatccttcctctaacctccaagctgttcttggtcatttctgggcataagccagactaactttgggagacatttagtttatagtttaaccttagactaccatagcccttcccaaaactaaatcacctttgtaaaactaatgaaaggccgcaaggttaggagaatgagaagggcccgaattctgctaggatggaggcgtaaaggaaaaacagccattgttccggaggtcacaagatttgcaacttccccaatctctcttgtagataacatcactattgtagaacctaagattggtcttttgaggtgtctattcagacttctgcacttctgacaattggctaactccacccagactcatgactcatgactaagcagtcctctgggacccccactcagaggcaaaccattttccatgcccctgtgatagcatccccaaccaattagtagcattccctagtcccctgcccaccaaactatacttgaaaaccgctaaactcaaagccttcacagggatcagtttgagtaataactccatctcctgtgtggtggtgggtcttgcatcaattaaactcttcactgtaatgccatggtctcagtgaattgattttgtctgtgcaatggggaggacaagcccatcaggcaattacagaaacatgctgggagcctaggcacctctgcgtctgctatccacatggccacttccttctaacaccaagcctgggatatcttcatcacactcattccccaaaccttggcccttttctcatggaacaaccttgctgaaagtcagtggagacagactctcactactatctcaactagagacactagttgacacaagaaactgtgcttctaaagatcacttataaagttggtttctaggaacttggagaccatttacccattgggtatgttttttttttttttttttttttttttcctgagatggagtctcactgtattgctcaggctggagtgcagtggcatgatcttggctcactacaacatctgcctcccaggttcaagaggttctcctgtctcagcttcccgagtagctgggattacaggcatgtgccaccacgcctggctaattttgtattttagtagagatgttgaccagactggtctcaaactcctgacctcaagtcatccacccaccttggcttcccaaagtgctgagattacgggtgtgagccaccaggcctggccttcatcatgactttaatttgcatttccttaatggctaatgatgttaaatgtcttatcatgtgtttgatattcttatatcatctttaatatgacatatcctcatatcttttgctcatttttaaactgaattttcatttttttttcttggttgttgttttatgacaaggtcttgctctgtcacccaggctgaagtgcagtggcacaatcacagctcactacagccttgaactcctgggctcaagtgatcctcccactcagcagtagttggaactacaggcatcactgcacctggctattaacgttgaattttcagagttcgttgtcagagatttgttttgcaaatttatctctcactttgtaaacttgtctttttattcttttttttttgagacggtgttgctctgttgcccagactggagtgcatgggcacaatctcggctcattgtagcctcaaccttcagggctgaagtgatcctcccacctcagcctcctgagtagatgggactacaggcatgtgccatcacacctagctaatttttgtattttttgtagagatgaggtttcaccctgttgtgcaggctggtcttgaactcctggactcaagcaatctgcccacctcagcctcccaaagtgctgggattacaggcgtgagctactatgcctggccctttttgtccttttaatgggtctttcatggagcaacagttttacatttttacaaagtccagtttattgatttttaaattttatgaatggtacttttggtgtcatgtctgagagttctttaccaagccctaggtcctgaagattttctcctacattatcttttttttttggagacagggtcttgctctgttacccaggctggaatgcagtggcacaatcatggctcactgcagccttaaccacctgggttcaagcaatccttctgcctcagcctccggagtagatgggaccacaggtgcatgctaccatgctgggctaatattctaaatttttgtagcaatgagatcttgctgtgttgctcagactagtcttcatctcaaaggtctgggattacaagtgtgaaccaccacacccagcctgttatctgctaaaagatttggggttttatattttaatctatgattctgagttacttcttgtataggtgtaacgttcactctcgtggcattggatgtcccattgctccagcatttttttctttttttttttgagacagggtctcactctgttgcccaggctggagtacaatggcacaatcttggctcactgcaacctccgccttccaggttcaagcgattctcatgccttagcctcctaagtagctgggattacagacgcatgccaccactaatttttgtatttttagtagagatgggattttgccatgttggccaggctggtctcgaacccctgacctcaagtgatccacccacctcggcctcccaaagtgctgggattacaggcgtgagccaccacgcctggccgctccagcatcatttcttaaaaagaccatccttctttcaatccttcattgaattgcctttgcatgtttgtcaaaaagcatttggctgtgcttgtgtggatttttctattctaggccactgatctatgtatctatccttccgccggtaccagttttgattcctgtagttacgtaagttttaaaatcaggtagagtgattcctcccacttgcttcttgctcaaaattgtttttagctattctagttcctttgcctctccaaacaaattttagttttttcacccaggctggagtgcagtgacgtgatctcggctcactgcaacctccaccttccaggatcaagtgattctcctgcctcagcctctcgaatagctgggattacaggctcccgccaccatgcccggccaattttatatttttagtagagatggggtttgaccatgttggccaggctggtctcgaactcctgacctcaggtgatcagcctcccaaagtgctgggattacaggcaggagccactgcgcccggcccctgctatattcttaatgtagcaaattagtccaacactgatcagactctcaagcgaactcttctggcatttgataaagtatcaagttattttaaaatatttaaaagttattttaaaagttatttaaaaatattgagcaactaccctaacacacataacataaagctatactaatcgcatggatgactcccaggtaccacacactgagacagaacttgggaggaggtggaatgggagcaggtttggtagaaggaaggaggaaggaagagctctgttgaggtatgttaagtgcgagatgcttattagaccttaaagtggagatggggacacagttggatgtatgaatctagaacttatttgagaggtctggtctgcagagagatacatttaaaactgtgagatgccaccgaacttttgctgagcttttatagctttcttcctgttaaattaagtagtttggctttgcaagtaagcttcagaagttcacccatcctacccacatttctattttcatgtttaagtaaatttagtagaggactagataaattatagtatccctcttattattcctatactaatattactttcctcattacttttaaacacttgactttcatgtcatttcccttcttaacagtcattaacttttatctcctataccatgctaagcttctctctggcattcacaatatattctccattgtcaaaatggctccttcattcctcctgaacacaccacgaatatgaccctggcctctgactttatgcagactgccacccaaactggtttcacaactcccttgacctgtacctctatctgtaagagcttgagaactctatgaagtctccacctgttccagcctatcatctcccctcctcatctccacatacatttgcatggtagtcttcatcatatggtctcttgcattttaaaaacctcaaacctacttctcaagttgtacaagctcactaacaggtcatgttggaatgagtttccaatcatgagtgccaaaatcatgcagtatttccaatacaaatactttgctttctaccccaaaaatacatgatccaaaactaaaatgcaaaggaataaatcaactgtatccaaatctcaattaataggactccattatcagcctagagtaccaagccagtaataatgtgagaggcagaatttagtcagaggcatagagagcgagcctaggcagaaagggcaatgagtgtccaccaggactaatgaggcgacctgccccaggccacacaattcctatccaaggcagcgcccttttcactaccagtccaccaactgcgggacttaggtgtgctgtcccaggaagaggcaaccaggcctgggggaaaaactgtaccttcttcttccacttaaatggaataactatccctgtatttctcctcagtctgcatggagcaaaaaattggttttagcataatccatcaaatacatgactccaagcaaccaggacagagaactccattggtaaacatacaaacccatgcaaacacacacacgcatatgtgagcacacacatactccagacattatggccaagcatgccatacaaaactgtgtttatcgtgaaacaatctgagttaggaaactaggattgttgccaccaccatttatttatctagttcataactaaggatagaacactatagcagtgctagagatgcaaagacgtccctgcccttaaggggcttacaatcttactggagaatataacaggcacataagaagctggactacaaggaagcatgagctaacaaatgccagacttcggaaggcagcgtagtttgagaacatgggattcagagtcacaaaacccacatcctagtcccaacccagtatatcagttaacctctctgggttttttcccagctacaacattaaatagtaagactgagaggctgtctgcatgtttccatcatcattcagatcaaaagctgagatgagctttagggaggaggctgcacctgagcgggacactgaaggaaggcaaaggaggtgtttcagacaagcaaagcagtactgaggtagctgtaagcttggagtttggatgggagacgacagacaagtgtcacaaggagcaacggcagagaggtgggtgggtggcaggaagcgccacaacactttccacacaggggtgggtggtgtgcctcacatttacagccgatcatttacagcacataattccagagagtagaaaataccagaggataatggcggcattttttcaaacatttcacttgatttccataaagtataaaataatttaacattatacctctacatttcaaaattcacatcaataaaccatcctaattgttaaaatgcaaaccaattcaaagtttacattcttagtaaacataactaaatctcttaattcaaaaggacatttgatacaaattatattactccaataattccaacattcattttccaccatgttccaagcactgtgaaaataaaaatgactatgacaaggtccctgcccttgaagagcctgcagcctggcagatgagacaaagatcaactctgcctacctagaacagaattactgtgatgcacagcctgatcaaggtacgagccgtggagcacaaagacggattcatccttcctgaagtttccacaagggctcaggagagaggtcttgggcacaagaagaaatgagtttggcagagagaaagtgactatgggaggagagggctcccaggcagaggacacacgggcacagagaggaagtccagggccaatgacagggacagggtggctgaagcagggtgtaaaaggcaacagctagtgatacgaaggcccggacttagtcctgtgaaaataaggagccattgcttgtcatgttttaatcatctactaacactggttcataaggtcaggaagagataggacagaaagtgagcaggaaggttctgtctgtattgtaggcagtgactgtctgctctccccagcaactaaactgctcagaagccacactccccatgacctccttccttcatcctttcttctgtctcctttttctctttatgatctgcttcccctctgtccttgagtcttcaaaatggagccagcactgggaaggcataggagaggagcaaaggagcaggactagaaacaaacatatatggctaatcgagttactataaagaaatggtaaccgtattggacaaaggtctgcagatgaaggaaactaattctttttcaggagttttccaaaagtgcccaattcacaccaaaattttggaaaatctcatacaatgtgggaaaagtatacagaacccttgcagaagactccatttcctaaactattttgcattaatatcaacgttacaaacgcaataccataggatttcagagcctatcttcacacaaataagatctgaccaaaattgcattgcttagcttaaaaaatactacacaatgtataatttcaagtcttaggttctcagctactaccaaaatatgtcaatatatgaataaactgccttgtgaaaaacatgcagtaaaaggtagatgcaaataagccatccctttagggtagacactatattaaaatttcttgtcatattataaaaccattctacaaaagtaacaccttcttgaaatttcattttgtaatgaagaaaataaatctgtatcattttatttaacattcattctttaagttacagttaacacaatctgcttctaatccaagaaatcctagtataatctgaaatacatgcatatacatttagtaagacctacatttctaaataaattacatgcatgatatacaataaagaatactaatatgaaaattcaggacatttatttttctgcatggaaatttaactactgtataacacacgcacatacaaaacaaacccacaaagcaacagtgtgtaataggtagtgagagacacacaaaataagcatatttaaaacgcctacaaacagccttttttttttaggcaacaaaatacgtccagtccttgacatcttctcatactcacctagcaccacagatgcaaggacctaacagtaaacatgtacaatctcatgcttaacacctaaagcatgcactgaattgaatttgtatgttgtgatctattctactaagtatgcaatacatactttttcttactaatattttatacattaaattaccctgcagcattttgaaattttaacattgatgtaaaacaacttttgaaagatttatgaaacaagtttcgaggttcaccttcaggctggtttggttaagtggaaaaatggcagcagcctcaaggttcatactgaatgaaaatggtgttgtgtgcatgtcaacccatgtaaaaaatacctatatacaagatggcacaaagatttgtgcagttggaatcaccagtgcaaatgcatgcatttgaggtacttatttttttcatggtcaggtataattatgcatagtcattttccttaagtgctaaagatttcagacctgatcaaatgaaaagctgtaagtgtaaatatgagctatttatatagttaatttcaaagtgctatgcttttaatgaacatatgtttaacattatagatttatatatttagtttaaaatatttatattactaaccaataaattttctcactataaagagactgactggcaattatacctggccaagtaatttaaatagcatacttgcaagaactgtagtgaaagagttaaatacttcattattgcttcattgaactgagaagcccaaaaggcatagatcaacaatgctcagtgatgaaaaatgaatacccagaacagcggtgcacgcccccaaaatgacctctgtgcaataaaaactaagcattctccacgttatcaatgccgttggcatccacatggatatcagactccccacacaaagatgagggaacaaagcggctaacagtgggacacaaacagctcttaagctctggcaattcctgcttcaggcgttccaattgctccacttggaatatatttggttgttcaggcatccaatcatatatcctatgatgaaacaaatacaaaacacataaaatactgtaattttatggtttacctaagacctgcctgactcaaccttttcataagaattcatttacagaatgcctggaacatccacatcagagtttttgttttgttttaaagatgaaagtatccattctcttttttaaaatttctcttcttcccagtctttccaataatccagaatagcagcattgcccttttgtacccccgatgcaatggagctcaacataaagcagctgaatcagaaaatgaaatgtctagtttacttgtgatctagcttaaagtatttgccctccaacttgcctttttttaacaaatggaaatctataaaaaactgactgctctgacttcaaagtcactaaagatcgagataagaagactgcttaccagcgtgggaactactctaaagctgctcaataacgtcagacacgtccagagtggagaactctgaaagagcctctggtgacctgacactggcactacccatcagcagagaaaagatggcctcctgtgcctgaatgtgacagccaggcaactatgtaaggcagtatcagagaatctttatgacatcacagtaggaaagaattttttcaacacgataaaaaatatggtgactctaataaatatctgactgtattaaaacaaagagtttctattaattattaaagacatatctaagagaatgaaaaatgacctctgggtcaaggtatcaagacagaacagaagcatctaacttcgttctctccctatattccattaaaaataaaacaaagattcttttcaataaaatccgtaagtaagagaaaaacccaagagacaaagctacaacattttgaaagctggaaaacagatggataaataagaactgaaagtttgtcagtgagagaactgaaaaggctggctcccaggccagtggtaggaaacaagagcagagttaaaagcaggagcagatcgatgtaagacggcggactgtcaaaccagaaaccacccctactcctaatccccctgtgaagaggagaaaacagaatctaatcaggaggttgctaacccagaacactatattaaacatcctctacagaacagatgggcactctggtttttttaaaaaagataaaagcaaaacttgacaagcaaacctgccgctgatctctaagtttgatcctgttgacttttgggctctgtacaaccatatccagttgtctagtaatttaatgtctggctgtgactactcactttttaaggatggtgttgagcccatgtgggaagatgagaaaaacaaacagggaggatgatggctaatttacattgaacaaacagcagagatgaagggacctcaatcacttttggctagagactctactgtgtcttattggagaatcttttgatgactcagtgatgatatatgtgcagctgttcttaatgttagagctaaaggtgataagatagcagtatggactactgaatgtgaaaacagagaagctgttacacatatagagagggtatacaaggaaaggttaggacttcctccaaacatcgtgattggttatcagtcccatgcagacacagctactaaaaacagctccaccactaaaaataggtttgttgtttaagaagacaccttctgagtattcttctgagtattctcataagagaccaagtcaagcaatcgagattttggagctgaatcaaagcctcttcaaaaactactagagtggactggatttaaatttaatttccatccaaatgttgctaagatgtaagagaagtctcattcactgaggtgggaggactggaactcaggaggtcaagggagcagtgagctgagattgtgccactgcactccaacctgggcagcagagtgagagagaacctgcctcaaaaaaaaaaaaaaaaaaaaaaatccttaatgacttcagggaaatagcatgttcattaaatgagaataggatgctaaatatatggaaaaaaatgcattcagagaaaaaaagatagttcttggaaattaaagacacaatagcagacatgaaaaactcaacagaggccaggcacggtggctcacaccagtaatcccagcactttgggaggacaagaaaggcaaattgcctgagctcaggagttcaagaccagcctgggcaacatggcgaaaccctgtctctactaaaatacaaaaaattagccaggcatggtggcgtgcgcctgtaggcccagctacttgggagactgaggcatgagaatttgcttgaacccagtagacagaggttgcagtgagcccagatcgcaccactgaaccccagcctggatgatagagtgagactatctcaaaaaaaaaacaaacaaagcaaacaaacaaaaaacataaaagctcaacagaatgagtagaaagtaagattgagaaaacctttcaaatgaagcaaaaaaaaaaaaaaaaagacaaaataggaggaaaaaaaaatcaaaaatctggtccaagagctatttgattcaaacaaaaagacttctataaagaaaaaaatcaagaaaattgaaagggtcaaaaatcaaaagaattatttttgaaaaaattttcctgtgtttaagaacatgtattgacagactaaaagggttaccaagtgtccagcaaagtgggcaaagccagacccacaagaaaacacatctctatagaattcccaaactctggtaataaaaggaagaccctcaaagcttccaaacaggaaacacagattacatgtgtgagaacataatcaaggtggcttcacactgagcaacaacactggaatggtaaagatgatggagaatgtttctaaaattctaaagtatttctaacatagagttctatacacagccatgatatttctggacatataaaacctcaaaaacatttacctcctgtgtccacctttcttaagaagatgctgaaagacatgtcccataaaactcattgaaccaagagaggaaaagatatgagctacaggaaacaggagatctaacacagagaatggcagggcacaggatgacagctgtgcacaatcaaccaatcagtactggagcagcccggtggagaggcagacgtattgagggctattactccgagagagacactgtcactctagcagctatgttaacctaagaacagagtgccctcatgagcctgaactggcatattacttaaatatggtctaaccatgtgctgattaagtttccacattacctgcaggattataatgctttggcctactcctgagaactggtaacaggctacagtgagtgtagaaccaggaaatacaggacagcccactcctgctatacctcctatgcctgacccacaggcagatgtgctgagctagagacctagcgggtcacacaaacagttcggaaagttaagactagcatttaagcgcacacacacaaagaagtacacgcatgaacaggaagtatctaaaggacacttggaattgtttcaggtgcatacttgtaaatataccttatctgtgtactgggttgccgcataaaataagctgggtgcaaaaaggtttgaaagtcattgtactatcaataatgttcacagcaacactataaaatagcaattacttggcagcaacctaaatgttcctaaatagcagtctaagttgtggtaaagacaacaatggaatattaacaagaccacgaaaaggagtaaggtatagctacatgcaacaatatgttaattttaagaacataattacaagttttatgaagtatatttaaagcttgaaactatacaaaactacagctggggcaggagaatcacttgaacccaggagctggagggtaaggcaggagaatcacttgaacccaggttgcagtgagccgagacagtgccactgcactccagcctgggtgacaaagactctgtctcaaaaaaataaaaagaacggcctcttactcatcatcctaagtgcaaattttccaaacaaaataccagaaaatgatatgtagcagttgagtgtttgataattgaaaacacactcacacactctcaccacacctctctccaatccaaaatgcctcaaaggctccaagtcactaatcattcaaaaccttctatgtgatatctaaatttgataatggaaaaaatagcataagcagattatttagaaatagaggtaactgccagaagagccaaataaagatttgaggggacacggtctcagccagagacaatggaagaaataggtacaagaaattattggtattttattataagacttatcaaactatttgaattttaaaactatatacacatgcttttttgaataaaattaaaaaaaaatgttgagggtaaaaaccaactcaacataacccacctttcccctcctcagaccctattaggaatccagtgcctggccacctccctgaaaccctcaacagtcatgccctgatttacactcttgcctctgcctagaacacaaatcttgtcaaagtaaacataaccactccccaaattccaactcaattcttcctctttaaagctccaagccaggaagaactttcttgagcacctgttatatcatgtatcttcctgttctccattaaatgtcaacatttgatttcaaccaagtaaagcccttgagatgaagaatctgcctgaaatttgtatactctacaaaaccataaatgatataatctcataatatacttccttgtcagaaaatatttgtaatcattccttgtaacaaaaatacacatataaccatatacattcaaaaatttgctaaagccagtacttgttccaaattatttaaaattttaattaaattagttggaaatgctgaagagcgctatgcgtcactcatgctatttcatgcaaaattaaccaaatagtttaaaaggcaggtaggtaggatttacttggactacaattttaaaaccaaactaattgagacaaaatactggaaggaaaacaagctttattcagaaagtaatataactttatgggaagaatagtaatatgagccaaatccaaggaatgtattgtttaaagcaggcctagtgagattttatcacttactctttgtgtaacacttctcaagcacaggcaatcttcgtcttactgcacttcgtctttttttaaatttcttataatttaattttattttatatgagatggggtcttctcccaaagtgctgggattacaggcatgaaccaccatgccccacctgcgcttttcagatactgtgtttcttacaaattgaagctttgtgaccaccctgcatccagcaagtctgttggtgccattttcccaacagcatctgctcacttcatatctgcgtcacattttgataattcccacaatatttcaaagttcattatgattctatctgatatggtgatctatgattagtgatctttgatgtcactattgtaattgttttgaggtgccacgaatcatacccataaatcagtgtgttctgactgctccactgaccagcctctcccctccctaactttctacctctcctctggcctccctattctcagagacacatccatactgaaatcaggccaattaaccttacaatggcccctaagtgctcaggtgaaagaagagtcttaaatctctcaatttaaataaaaaactagaaatgattaagattagtgaggaaggcatgttaaaaactaagataggctgaaagctgggcctcttgaaccaaactgttaaccaagttatgaatgcaaagtccttgaaggaaattgaaagtgctactacagtgaacacaacaatgaaaagaaagcaaagcagccttattgctgataaggagaaagttttaatggcctggatagaagatcaaaccagccaaaacatttccttaagccaaaacctaattcaaagggcttaactctcttcagttctatcaaggctgagagaggtaaagaagctgcagaagaaaagttggaacccaacagaagttggttcatgaagtttaaggaaaaagaagctgtctccataacgtaaaagtgcaaagttaagtatcaagtgctgatggagaagctgcagttaaggtatccagaaggtcttgctaagatcacttaacaaagtggctacattgaacaacagattttcttttctttttttttaagacagagtctcgctctgtcacccaggctgcagtgcagtggtgtgatctctgctcactgcaagctccgactcctcggttcaggccattctcctgcctcagcctcccgagtagctgggactacaggcgcccgccaccacgcccggctaattattattattattattattttgtatttttagtagagacgggttttcaccgtgttagccaggatggtctccatctcctgaccttgtgatccgctcacctcggcctcccagagtgctgggattacaggcgtgagccatcaggcccggccgaacaacagattttcaatgtagacaaaacagccttctattggaagatgcccatctagacctttcacagcttgagagatgtcaatgcctggcttcaaagcttcaaataacaggctgcttctcttgttaggggctaatacaactgatgatgagtttaagttgaagccaatactcatttaacactctggaaattgtagggcccttcagaattacgctaaatctactttgtctgtgctccagaaatgcaacaaagtctggatgacaacacatctgtacacagcatggtttactgaatattttaagcccatagttgagacgtacggctcaggaagaaaaaatattactgatcattgacaatgcacctggtcacccaagaactctaacagagattgctgctttcatacctgttaacacaaaatccattctgcagcccatggatcaaggagtcactttgactttcaagtcttattaccttagaaatacatttcaaagactgtagctgccacagacagtgattcctctgaaggatcttggcaaggtaaactgaaaactttttatcattccagataccattaagaacatttctgattcatgggacaagatcaaaatatcaacattaacaggcatttggaagaagctgatatcaatcctcatagatgccagaggggttcaaaccttcagtggaagaagtcactgcagatgtggtggaaatagaaagagacctagaaatagaagtggaacctaaagatgtgactgaattgctgcaatctcatgataaaactttaacagacgaggagttgcttcttatggatgaggaaagaaaatggttttttgagacaaatccacccaacaaagatgctctgaacattgtttaaatgacaacaagagattcagaatattacataaacttagtgaataaagcagcagcagggtttgagaagatggactccaatttaaagatgtacttactactgtggggcagggagtggtggccacctgtaatcccagcactttgggaggtaaaggcaggcagatcacctgaggtcagcaattcaagaacagcctaggccaatatggtgaaaccctgtctctaccaaaaatacaaaaattagctggatgtggttgtgcatgcctgcagtcccagctactcgggaggctgaggcaggagaatcacttgaacctgggaggcggaggttgcagtgagccgagattgtgccattgcactgcagcctgggcgacagagcgagactcaatctcaaaaaaataataataaaataaaaataaagatgttttggcagggcgcggtggctcacacctgtaatcccacagcactttgggaggccaaggcgggtggatcacttggggtcgggagttcaagaacctggccaacatggcaaaacctcttctctagtaaaaatacaaaaattagccaggcatggtggcaggcgtgcgcctgtaatcccagctacccaggaggcagaagaatcgcttgaacccaggagatggaggttgcagtgagccaagatcatgccattgcactccagccagggtattaagagtgagactctgtctcaaaaagcaaaaacaaataaaaaagatgttttactgtgggtgaaaaatgctcttaaacaccatcatgtgcaacagagaaatattgtgtaaaaggaagagtccacgggtacagcagacttcatttgtgtcttattttaagaaactgccacagccacctcaaccttcagcaaccaccaccctaatcagtcagcagccatcaacatcaaagcaagaccctccagcagcaaaatgattatgatttgctgaaggtagattgttagcatttcctagtaataacgtattttaaaattaagatatatactgtgttttctcagacacaacgctactgtacacttggtaaactacaatgtagtataaacataactttttttttagacagagtctcactctgtcacccagactggagtgcagtggcgcgatctcggctcactgcaacctctgcctcctgggttcaagtgattctcctgcctcagccccgagcagctaggattacaggcatgtgccaccacacccggctaatttttgtatttttagtagagacagggtttcaccatgttggtcaggctggtctcaaactcctgatctcatgatctgcccgcctcagcctcccaaggtgctgggattacaggcgtgagccactgcgcccggcctaaacataacatttatatgcactcggaaccaaaagatttaggacttgctttgctgtggtggtctggatcccagccttcactatcgctgaggtacacctgtatgagcaagtctgctaatccctcagcagagtaaatgacatcccttctaaccccaaatatctttatactaaagaaacctttttgactctcagattagtggctgccaaagaagctgatggaaaaaaaaatatttgttcaataaattatttgactccctactggatgccccacattgttctaacctcaatagcaatgaacaaatcaggcaaacagccttgccctcctcatggagcctatattctcatttgcatgtgtgcattagtgcccaggaggatggaggaaaggggctagggagaaaaacaagtaaaatgtaacacagaatatgtggtgtgtcagatgatgataaatgatatggagacaagtcagggagtgcactgtgaatagaagttgttatttgaaatcagttattcaagaaagtcctcactgaggtgacatttaaattgttacggaagtctttctccaaagaatgggaaacagcagatgggggaattttgtggaaggtcagagagggaaagagggttgaaggtggtggggtggcagattggctcatatagggccctcaggcttcagcttttcctttaggtgacacagaaaactgtgggagagttttaagtagcaacatgatcagacataggtcttaaaagcttccctctcactactgtactaagaataaacagcctgaccgttaagggtagaggcagtcaccagggggcaggctacctcaacaatccacaccaaagatgagctgctttacttgagtgacaacagttaacttggtgagtagtctgattcaggatatattttgaagacagaacaaaaagattttctatctgactggatttggggtatgagataaagaacagagtcatggaagactaagaatatggtctgaattgtcacttatactgaaatcaggaagactgtaagaggaacaggtgtcagtacctggaaataaaagtctacagaggtctagggaagggtctgagttggagatacgtaagtgtgagaacacagaaagttatgaaaagccacagaattggacaagaggaatgaaaaagttggtatagacagagaagaggtctaagggctggcagtcaccctcacccccagggtgatttagtatatatatctgagttaaggcccagtcatttgaatccttaacaagcttcccaagtgattctgctatccttcaaactttgaaaacacccacaggcaaatgtcaagataacctcaggctgaactgcagaattttaacttaactaagtttaattttatttataatttcgtaagatgaaatctatacttctaaattccatgaaaatttttcatgaaaaacaaatacctatcataaattagaccattaactccaagttccttcaatttccttctgttttcaggatcattggtatcatcaccccagcagaatatgactagtcccttagcttttgcctcttgaatataggatgggtttctgagcaagtcttcagtatgtacatttatcccctagaagaagaaaaattagttgtgcatgaaaaagaaacattaactgcaaagctaaatgctcacactctaaatcagtgctctccaaagtacagcaggcgggaaaagaaaatggtagatttttttcttccaattactttaacttattctttttaatggacacttcatacataaatatattcacaatatattaatatatacataatgtataagcatacatattgaatgtgcagtcaaaaaatgtactaatggaatgctctaccaaaacaagttcacgttcatctgtaaaatgggaataatatttttaaaaggcatacagtctgaacatttttagattattcataaaatctattcagaaagttaaactaaaaaatttaacgtatgcctataacaaattttgtacttaatgtaattgtttttcatcctgagatctaatatcctcgtttttaagtagagccacttgtttgctacagtttagtcaaaacgttaacattagatgggtaaagtaatatgaaatctttactactactccaaaatagaaaacagaacattaaaaagataaaaattcaaacataacttaccagtagattttcaaactgtgcaaagctcattgcaatgggggttgtccgagatctgaggtccatgagttcaggataaatctcagattttccttgagttaaaaatagtatcggatatttgttctgcttttgccgaaccctgaaaagaaacaattttaaaaatacctttcaatggggggtaactgtaatattcctttttggaattttagaaaacactgaaagtataaagaaaacaaacgaggccgggcatggtggctcacacctgtaatcccaacactttgggaggccaaggcgggcagagcacttgcggtcatgagttcaagaccagcctggacaacatggcgaaatcccatctctactaaaaatacaaaaattagccgagtatcatgcacaggcttgtaatcccagctaccgaggaggctggggcaccagatcacttgaaacctgaaggcagaggttgcagtgagccgagatcacaccactgcactccagcctgggcaacagaacaagactctgtctcaaataaataaatagatttaaaaaaaaaagaaagaaagaaaacaaagaaacatattcccatttctcagctaaaaccaccattaacatgcgttgccttttcaggccaggtacagtgcagtggctcatgcctgtaatccacactttggaaagccaaggcaggaagctcacttgagcctaagagtttgacaccagcctgtgaaagaggaggagacctcatttctacaaaaaatacaaaattagccagtcttaatggcacacacgtgcagtcccagctactcaagaggccaaggcaggaggactgcttgtgcccgagaggtcagggctgcagtgtcatcatcacaccactgcagcctgggtgacagagtgagatcctgtctcaaaaacaattttttttaataaaagataaatacaaatttaaaattttttctatacaagagctaaaatattctcagatatcggcagtgataaatccctagggagcttacaatatggtaaggagtatatgacctgcctgtaaaataaagggtgtaaggctctaggacctagtaggtgtggacttcacaggagtagcaggcaccctagcaaacagtcaagaaagggcatgaggaaacacacaacctgacatgatttcagaggacagatcatgggggaaagctggacaactaccccacctccagactgctgccttaagtcctagacacattctaagagtataggaaaaaatacagagtattactcacattgtgcaaatatctgcatcaaatgaagaaaacactattctcctcttcccagaattttctaaaacagtttttaaaattatatccaaaaacagattcatgtcaaaatatgttgataagttaccatcccacattccatcctagtgaaagagaaagcaaaataaaagtcactgcacatcctaaaatcagtgctagcaactctgtttttattctggcaagctatgatgaaaaaacccctgacagtatctagtccaactactattttatagatgatgaaacctgaaaagattaagtgatctgcccaagatcacaaagctatttagtgatgacacaggtcataattcagacatagagactctcatacaaaaagcaagtaactattaactatatcatcaatacacttttgcattaataaagttaaaataaaagctaaaactctagaattttgcagtctgctatgactttatttccataaattataagacacacacatcatctgctaacaaattaataaaatgtccctactaattattaattaccagtttaaaagtctcattctttgggtcttgggcatatcaagtaaccaaaaattaattaaagtaactcaataaatatagccaagacaccaagccagctctattgacattcaaatgttaaatgttttaagtattagtcactgaaataattctagaagctcagaaaactaaaaatcacattattagggaaaccttagtcgagaattcactacattaatgaggaccagcttgtcacaaacagcataatgagggcaattacagattattctgaccaaaacaaattcaagggtattgctcaatgcccaatcatgacatctgaattaactactttcaacaccccacactctactaccccaagccccttgcaatgcatcccatcaatctgcacatattctctctgatatattcaatagttagctaattgttttccacaactgaaatataagtcccaggaagacaaggccttattctcttttgtggactacttgtcccgagcacttggaaaatgcctggtccatagcagcttttcaaaaaatatttgttgaacaaaaaaatgactaaatttgtaagtgatttaaaacaattgcagaaatttttttcctgaataattattactagctactgttaacaacagaaaactgcttagaaaattatttaaaacattcttatatgggaataagaaagtaaaaactaaatccaagagatgtgactatccactttataagtatctccccaaaaccaccatattgttcacacaagacacatgtaaactgaaatttctacaatattcatcattaatttgaaatactcacatactagcatgaatgcaagatatgttttatttaaagggtccaataagcattgtgcttggtggaggaagccacaatgagatttcaatttagcttattccattaaaatacaaagacaggaatgaaagaattttttagataggcatagagagtatagaatgtgctgcatagagaattacttaccctttgctggcagatccattttatttcaatgttaaaccctacatcttctggcaaagactctaaaacctacagttttgtttgttggtaaattttgtttttgatgagatggatagcagaataagaaaacaaaaaaaatacaattattactaaaaataataagaatttatcattagtagcaataaaatgttttgtgcataatgcacaaacatattttgtcatactcaaagtgacaacctggtagatgattatgttaaataaggtcaaaagaaattaagcagcaaaagcaggagtctcaggcactgtctgtgataactgacaaacacaaagatggtccttaacctcaaatccttttcgccattactagtaaacatccaaagtgaactctaacacaataggcaacatcatgaattcaagacatttgtcatgtattctacactgcatttggggatgtcaatctacttgcctaaaatctatgaaaaaccatgatgtttagattgttttgaaggtgatgatgctaaacaaatcccataacttcctgaaaagatgtatccccaaaatgaaaacattatgctacagctcataaatcaaaaaagttataatttatataaatgacaaatgctatcagtgtatctaaactaaattatctagacactttgccatcagattattttggcagttttaactagaaaatgacattgaaaatatgaaacttggttagtaacctccaaagaacggacttgttcagtcttaaacaaacatgaagcccagacatatacataaatatgctcagggcaaaatgaatttgacagagattatgttatattattattatttttgaggcatagtctcactctgtcacccaggctggagcacagtggcacaatctcagttcactgcaacctccacctctggggttcaagcaattctcctgcctcagcctcccaagtagctgggattacaggtgcctgccaccacgcctggctaattttttgtattttagtagtgatgggtttcaccatgttgactaggccagtctgaaactcctgacctcaggtgatccacctgccttggcctccagaagtgctgggattacaggcgtgagccactgtgcccggcagattattttagatacttcaaaattttaggtatcaaagaacatgtatagcacatatggtatttaatttttaacagcaaataaatgcatacaaacagaataatatagtggtaagaacacagcccaggagtctggtgacctggcatctagctctgggcctactcttaaccagctgcatgtaaagtacagcatctaaaacagtttgtattcaattttgtgtgggacttttttaattttctcctatatctaaagacttatttaacgtatctgtcatatttttgctggactaatgcaaaatgagaaagactaggacaatatattagtgttgagattgctaaaaggcaaatttgccagaaaagtgtctatataatgagattatatttggtattattttggcgttaaaatttcttttttttttttttgagacggagtctcgctctgtcatccaggctggagtgcagtggcgcgatctcggctcactgcaagctccgcctcctgagttcacgccattctgctgcctcagcctcccgagtagctgggactacaggcacccgccaccacaccaggctaattttttatttttaatagagacggggtttcacatgttagccaggatgatcttgatcccctgacctcgtgatccacctgcctcggcctcccaaagtgctgggattacaggcgtaagccaccacgcctggccaaaatttctttgtgattgaattataatggcaaagtgagtaaatgagtttgcgtgtgtgttttaacttatttgactaaaaggctgtcaaacctgtatcacaatttaaaatttttttcctgggaatcatgagatttctaaaacacaaatgattttagaaaattgaattagaagaaatgatcttacttagatgggcttcataagtaccttaaaagttatacaaattacattttacttatttatttatttttgagacaggatctctctctgttgcccaggctggagtgcagtggcacaatcacagctcactgcagcctcaacctcctgagcttaaactgtctgcctgccctggcctcccaaagtgctgggattacaggaatgagccaccatgtcccgccaaaaatgatgttttaaatgcactaggataatgttcattgcaggggctctcttttagcatcctttttgcagaatgaataatcaatacttaatttacctttaaccactgagattttaatgatttagattgttttatgaacccctcaagaaatacatacctaaatattttaacaaaatcttcattatggtcacttctctcctttctaaatcacacacacatttccatgcacgtgttagcaagtagctaatacagtagataaaacccattaagctaataagctccactccccaaataagaatttccacataatagtaaactaaaactacctatttttgcctaagaaatctactatacctgacacgagcagaaaaagacaacgagaaagaccagaatttagaaactggagtcggtggaacaaaagcagagccagcatctccttggcatctgtgtgggctttcctgatgctgtcaagggtgttcccgtattaaattgtatctagtttttaagtcttcatgctagtttttgtgtgaagatctattttttcagagtgaatttctgaaatttcaatatcatcttaagtaagaggggcacttattttctttggttgaagaaactcgcttccctctcaaaactaaggaacagtttaaaatattgttaaaaaaaaaaaaccaaaaactgcctctcccaccatcacctttctctaactcctatacctgtgccctctccttcccatttataaacagaaatatatggatttgctactcttaccaaattaccatactgagatgggaatttttatttatttgaatagaagttactcttggggaaagaaaaaaagtagcacaagtatactacacaagaatgaatcttattggctgggtgtgttggctcatgcctgtattctcaacccttggggaggctgaggctgggggacagcgtaagtccagaggtttgaattcccttgagaccagcctgcgcaacaaggtgagaccatctctacaaaaaaataaaaaaattagccaggcatggtggtgcacaactgcagttccagctatttgagagactgagtgaggtgggaggatcgcttgagccaaggaagttgaggctgcagtgagccctgatcacgccactgcactcagcctagatgtcaaagtgggattgtcactcacacacacacacacaaacacacaaagtatcttctctaaaaggcaccaatgatgataaattcatattaacattgtctttaacacagcctttttaggatccttttaagaaacaaaagtaaattattcatacatgacaaagttaatgatagccttgccttggttttcctcaataacttaccatcttaagagaaggaaatggctgattttctgaaaaggaattttcctcctgaaccacagattctgaaattttaaaacacaaaatctcagtaaataaaatgccactatatcactaagagctttcttaaatccttagtgccaaaaaaaacagggaaagagagagagagtgtgtgtgtgagcaagcgcgagagcataagtaactctgagatccctttttttttttttaatagaggtagggtctcactctgtcatctaggctggaacacagtggaatgatcattgctcaatgtagcctcaaactcaagcaggctcaagcattgatcctccagcctcagactcccgagtagctatgcccatagacatgcactaccacatccagctcattttaaaaatttttttgtagaaatgaggtctagttgctcaggctgatcttgaactcctggcctcaagcaattctcccaacttggcttccaaaactgctgggattacaggagtgagccaccgtgtccagcccctatatatagtattttttaaaggctcttgtatgtattaaacatcaaaaacccattttctaaataagcatcatgaaaaccagtttgcaacgattaatagacaccagtctgtagacccaagagtgattattttcttataaaatttgtactaaagtactactctttaaaaagtagtcacaagctgtgattttgctatttctccagagaattaagagttgtgtgattttgctaagactactatttgaaatactaaaatcagctcagaaattacaaattaagagaatatacagcaactattgtgcttttgttattatcaattaatcaatatagactaaaaaaaagaattattttccaaaagtggaaaaaattaaaatatcaagtttttcttaaaaacacacatacaaaacctgtattacaaattcaaagacaaaatcatgtataattttccagcagaataaactaaaggtaaaattcattttattactaagactcataaaatatctataagcctatatagttacgtttatgctctgggtggggataatctttggtcttaagcacttcacaatctttataaagatattaaaactgtatggttatcacaattacagataaacacctatatctatagtacacctactatatgtacagcaccatcagtctctgggaatataaaaacattttcctacccctgaggggctaacactctagttgaaaagacaggacatatatgaaaataaaggatttaaaatgaatacaataagcctcatatgaatggcacagccattaatttctatgggagtagaaaagtgaagtgaaattataaagggatgtggtaggcaggacaaagcttgcccacggtcataacaggtaaatgaagagctggttcaaattgaccctgtagccggattctatagttgatttactttctactttgtaatggttaagaatgtttggaaagattgataagtattaacactttgatcatcaagctaagaaaagcaatgcaatggttactatacacatgatatatatttagtagaaaacaaatgcaaattcatttccgaactataaaattacatttagaaggcccagtattatactcataaaaatgaccaagtatcaagtatgtgctaaaatcgattttaaaaatcctattaatgctaactacaaaaggaaaacagtgtttccatattggtacatacctttccgatccttagatttcagtgcagtcacatgagtgagctagaaagcacacaaacaaaatgaaatcagaaaggaagccttagcttatgaagagatggttaacagaaaatatcctgaaaaactagcaagataaaaaagcctataaaacgtagaactatcagtttaataagaataagcactagccactatatatattttatatgtgcatacacatttaagataatgatcaaatactcaattagggaagaatataaaaattcttcactagataactgttaatagggaatcatgcatttatttaggttcctaatagggacaggaagaggtaccatgtaaaattacatgatacaaaatattcaaaggtattggaaattaacatatatttaccaactattgcataaaaggcctattgtaaaataatgaccattatatgaagaagggctactgcagaacagaagcaacctaaagattatgaatgagaagggctagccactatggcctacaaaaacttatggtctagttcgttccttcataaatacaaaaaccagtggggtccatggaaatggttggagaagacagctggatcgatacagaacccttctcccaaacagaacagaataccaaagcacatagtctacacattaaatttaacagtcatccccatgtgcaaagagaacataaccatatacaagcaagtacaatagtcctaaagctaagggataatttacatttcatgttattattactacctttaacaactggagttggtcaaatgttaattcttttactggaatttcaaataattcaactggatcagcatcaaatttctaaaaaaaaaaaaaaaagaaagaaagaaaaagaaagaataaagaaaattaagagaaaagtaagccctaaattattactgaatgcttacactagacaggcctagcaactctatttactcaacaatgagaataactgttagtagccatactgagcccatgcaggacagcccttctaacctaacaccacctcccagcccttatattctggctttcatttttattgcagtgtagaatacctggaaggaaaatgcagctggcagaaagctgtagcgctgaagacagctgaggatagaaccagaagtcagtcatctcccctacttcctgttatgctgtctatacattttctttgatacttatccatactacgtgactagaaatcaatatgaaagtactatataaaatttatttctgtaagtttctaatcttttcgaagacttttaaacatctgattaaaaacagcagacacaccaaatgtcatgaaaaaattgtctgattagctataaaccataatacttaagcactctgagctaccatgtttcccccacaagcaaatctgttgtattaggttttaatgtctatcaaatgatcaatgtcactctgttgaaggcacttctacaggaaatgaattaaggtatcaccaataaatcatctgtccaacaaatatacttagtatatatatatatatacttagtatatatatatactaaaatccatcacatatatattcattcatatgcattggtatgaacctgtacatgcataaagtttttctggaatacacaagaaactattaaaagtaagacagtaagaacaaggaaaaacaggaaagatttatttctcatttcataatcttctgaaatactttttttttttctaatgaagatgaattgtttttataagaaaaacaccagcttaaaaatcaaaattcagtataaaagttcattgctttcatttctcaattaactcattcaggttcaacttcagatcaagatatagcctggtgaaaatggggcattagtaatatttgaactctcattgattttcagaagtaaactgtagcttggccgggtgcagtggctcacatctgtaatcccagcactttgggaggctgagatgggcggatcacctgaggtcaagagtttgagaccagcctggccaacatggtgaagccccgtctctactaaaaaatacaaaaattagttgggcttggtccagctacttaggagtctgcagtcctagctacttaggaggctgaggcaggagaatcgcttgaacccaggaggtggaggttgagccaagatcacatcactgcactccagcctaggcaacagagcgagactcggtctcaaataaataaataaataaattgcagctagatcaattaatctcaatcttggctaataagatcatttatcacttcactctttctcatttatcttttcattaatgttcttccatgactaaaacaacctgttccatgtgtttggtcactctactcatgtaatctgaatagatgcacctccttcctttcctcccttcctcccctcccctccccttccttcctttcttccttctttctcctaataccatttcgcagaaacaaaagggtcctttcctatacataatatatacatcataataatccaacccctaggaactctgattaaaattcaccagcaggtggtgccagggtctttgtcacactctttaatacaacagacagtatctggtacagtgatgctagccaactagactaactttaaatcaactcagttggaaattaatacccaacacagttttagagtctaagtccccgagaaatcacttggttacatagtatactgacgtttagggactatatcattatcatgattatgtttgtacaaaaacaattacagtttttttacagctatgtaagtttttaaatctcattctggatccccccccgccattatgccctcttctccattcttctggtcccctactccaattcaggcttacctttcctgtagcccacattgctgctcgccctgcctgcagtctctgtcctctgaaattcctatttcatcagctaccaaaacattagtcttgaacatttcccttttcagctaaaaagtatttcctacccccctagttcttgagtctaaacctcttcactgaggccctccaccatctaactccaaacctctttttgaatttttcactgtggctcactagccttattaattgaagaagcttgaagcagaaacagctggaatcctagaaaacaaacactatgatatcttcctctcttgcctcaatatagtagcatagacagaccgctacagaaaccacctggaatgtcccttttttgtaacataataaagtattttcagcaatagagaccctactctaggaaggcagtattcccaactcatcactgtctcaatgttgcaagagcatgagagggaaggactggcagtaattcaccaagaaaatgaattaaccaattctatttaataagtaattaaaaatataaaaaaacttcctagtttttaaaccttttacttaacattaagagtttgaaatgaagaaatttcaacgtacctttttcatagtcaaacaacaggtaagatcatgatataccacgggcacaaagtcctttgaaaggtgtacgtcaaattctacaaaggctgcaccctgacagaaggaagcaagtatttgaaaaacattgcctggtacacagtacctctcaaactgcaagaacgtaagaaatttttgttcactataaaattacagacctgtacaaactttttctaaaaagtaatgtattctcttaaaacaatgggttttctcttttgcaaaagcacagctactttttcctggcaaaaaaaaaaaaaaaaaaaaacggacacagattcacttcaaaacactcagaggcaccgcagtggcagtgagacagccttcggggctgttacttctgcaactgctattggcagaaaaggaacccaacaaaagccccaagctcagggatcccacacattgctgcccactgcccctgcaaaccttagctgcacagctaacatgaaagattcagtgagggaaggaataagctgcaaagtgccttagctcggctccttagggcacctgagcagtccactgtacagcctttctcagcaaaatgtcagtacggaatgaaagaggaagccataactgctgatgaacagacagagacaacagaaacaggaaaaagatgatgctcatgtccggtttcctaatgaaagccaaacaaatgaggaagacatgaattatagttaaagccaaatttctaaaaagcagatccacacagaaggagcaggactgaaattaatttaaagaaaaaaagaaagaaagaaagaaaaaggcagatccactcacccctatgaattaattcagttaaagtctgtatgtcataaactgacatacaaatatgtaccttttctgaaaggccagctgcgatagaaggaagcaaggtttgaaaattctgtaacactactttactgaaaagatgggtgcatttctaccccttacactggctctaaattgtcaaggggtagaactcaacttgggaatacacatggatcacagactagagtcaaaggagttcaagagtctggcgaggaagcctacttccttgcagacttccgaagcgggaaacttagcacctcttattttaaacaagacaataccaaaaccctttctaccaaagaggacaaaccctaccattcccaagtagttctaactattaaacattttaagttgtagctttctaatttttttggttttagacaaccataatccttatagaaaataattttagtagaagacaaaacttaatcccaaaattcatcatgaggtttaagtaataagccaataacagaccgaaacatcttcatagatatgtatttaacattaaaataagccaataataattaaaataacacatctgaaaatgtgatccctgtgagttataaaggatttcattagaatatggaagaaaaaggcttaatgaaatcctctctcaaaaagcacatatctaaaaattattggcagggtgcagtggctcacgcctataatgccagcactttgggaggctgaggcagtcagatcacctgaggtaagaagttcaagaccagcctggccaacatggcgaaaccccatctctactaaaattacaaaaattagctgggcatggtggcaaacgcctgtaatctcagctactcgggaggctgaaactggagaatcgcttgaacctaggaggtggaggttgcagtgaaccaagatcatgccactgcactccagcctgagtgacagaacaaaactccatctcaaaaaaaaaaaaaatttaacagggtcatcacaccggcatgatggttcatgcctgtaatcttagcacttagggaggccaagtgaggggatcgcttgagcccacaagttcgaaaccagtctgagcaacatagtgagatcccgtctctacaaaaaatacaacaattagccaggtatgatgacacatgcctgtggtcccagctacttgagaggccaaagcaggaggatcatttgagcccaggaggttgaggctatagtgagctatgatcctgccactgcactccagcctgggtgacgaagccatcacgtttatagctaatgaaatgatgtttagactagctatgacagtaaaactggttccaaattaattataaactatagcctaataatattaataaatatcatattttcaacagaaagataaaacaatctactaacattttaaacattaaaattatgatcaattcaagatgtcatgaattttaaaatgcattattttatataccactaagagggggaaataagctgtcaattaaattatgactcaaagctaagttgtaaacccattccaatttccaagaggctaaaatattttaaaagtacaccttagaatagatgttagttcatataagtaataaagctaaacactgactaaccaagtttacttcccgaactattttttacaaggcaaagttgagggcatatggagtacactgtggaaaaagtggaaattaaaaaatgagatgttcctccattttccccctagtttcactttggaatgtgaggcggtccagacaagtacagaggaataggggagaaaaatctcaggttattgattaaaaatgtccaagttgcagttgctgaaaatactaacagctaaaaaacagactctaactggattaaaaaaaaaaataaggagttaaggaagacaagttggtatgcaagggtggaaactgatacttttttatttatttattttttaaaagagatagagtccaattctgtcacccaggctggagtgcactggacggatcatagctcattgtagcctcaaactcctgggctccagcaaagctccagcctcagactcccaagtaggtgggactataggtatgagccaccacactcagctgatacacttctttcaagtgttacataaaatcaccatcaaatctttccttctttttttttttttgagactgagtctcactctgtcatccaggctggaaaacggtggcatgatctcagctcacagcaacctccacctcccagattcaagcaattcttgaattgcctcagtctcccaagtagctgggataacaggcgcgggccaccatgccaggttaattttttgtatttttagtacaggctgggtttcaccatgttggccaggctggtcttgaactcccaacctcaggtgatctgcccatctcggcctcccaaagtgctgggattacaggcatcagccactgtgcccagccagcattcttttttgagataataaattttgagtaattgagacaaaagaaagttcccactaagcattggttttcactacctgaataatgtgcttattcagatactcactttggaaaaaatgcctttagaaagatttgagcccaggagtttgaaacaagcctgagcaacatagtgagaccctgaatctacaaaagagaaaaaaatttaaaaattagccaggcatggtggcacatgcctctagtcccactactacggaggctgaggtgggaggaatgcctgagcccaggaggttgaggctgcagtgagccatgttcgcaccactgcattccaggcccaggtgacagaacaagaccctgtctcaaaaaaaaagaaaagatgcttatggttctattgtcttcattccgatcttcaccatggatctgaatataaatgccaagagatattcccctaactattaataaaaactggaggagactccctgatccatatttctctacctcagcagtctaaagttgtttaaaggttacttacatgactagcagcatttcttaaagaagcaatagtattttcttgaactttagccagcctgaaaagaagaaatacagttaacatagactatagagaagataaagaaacaaatgtaataaagaagcaaagtgtactttcaacaatgggaaatggtacttattctgtattctgaggccagttttgacatccccaaaatatgactatggctgtgactaggaatttattccttaaatgcaagctctgacaatgatagatatttacaagctgaataccgacatggccaacacaacatgcacttgccttgtaccatggacttttttcttggagacatgtaaagtgatcaataaaaacaatccttttcaatggcagaagaaatagagacatagaaacctgctccttgcaatacagcctccaaaggacttaatactggcagactgtgggggaatgagaaacaactgacacacacacaggatagaagtatggaaactctattcataataagaacagaaagggggaaaatgtattgtttaagatggggcctgagaagttgcggtggctcacgcctgtaaccccagcactttgggaggctgaggcaggcagatcacttgagctcaggagttcaagactggcctgggcaacaaggtgagacccggtctctacagaaaaataccaaaaaaatagctgggcatggtaccacgtgcctgtggttccagacactggggagactgaggtgggagaatggcttgagctccggaaattaaggctgcagtgagccaagaatgtgccactgcactccagcctgaacgacagagactctgtctcaaaaacaaacaaataaaaaaggtgggggcaggtgagggtgcttcttccttaaatagttatttttttatagaccttaaaattaaaaaatcctaatgatctccacagcatcactttaaaataaaatggggagggattaaaatttacagtagaaaatctgtggcatgagctatcgcactggtaattaaataaacttacaaaagtagaaggggaagacaactattccaggctacaatctaatgtctgttgagaagacagagcatctttcgttgaggtccaagttaactaatattccttgagtttagtcacacttttctagacttgggataatgttgtccaaatctttgcattttatagatgcggaaactcagactcagagagggcaacacgtcaaaagtaaggaccatgacacagacacacacactgatgctcccaaagctttctgcaccaagctttccttcctgcctttctacttttaatgtcttcctccttatcaattcagtagatatattaaaaaactgaccagaatcttaaggttggtctctaaccccaattaccaaattacactaaattcccttggtaaataataaaaacatcatttgacctttgctgagaaaaccagtgtaactctaccgaacataagctacaccaaatgctaatcctactcaaatattcaacttactgggcagttgttgtagagtttcctgcacctcgatggccaacatccaatggtattcttggcttccaatacttggaaaatgaagatttcatgtcacaactgtatcctggtaatggcttaataattatatagtcaactttcataggaaaaaagagggaggaacaaaaataaaaatgattaaaagggccattatgagctacattatatttaaataccactcaagtcagctttatcagtttctgtcaaacggaaaaaaaaacaagattcaaaatgtaacagacatgctccttaaattgatactaaagcaaattattaatttcatctttatcattatcaaatacttaatttgaaactaattaaaattctaacttaaccttgggttatttggcagtgtcttcaaccttacctctcactttgcctattgttttccgggaatttctgctcatgatgggaagagtaagaattccagcactctttccactctcagcaatggtggatgataagagacaagctgtacccacatgtccaggaagggcatcaccctgaactacgtgctcactgagatcttcctgaaaaaatgagatttaaaataatcttaatttttaaacttctacattacatacatacatatacacacacacacacacacacagacacacacacacatatctcctatatatgaaatgtgtatatatatattttttttttcataaaaacttcagtattttcggccggggtcagtggctcacgtctgtaatcccagcactttgggatgctgacgcaggcagatcacaaggtcaggagtttgatactagtctggctaacatagtgaaaccccgtttctactaaaaatacaaaaaattagccggggatggtggcgcatgccagtagtcccagctactcgggaggctaatgcaggagaaacacttgaacccgggaggtggaggctgtggtaagctgagatcgtaccactgcactccagcctggacaacagagcaacactccatctcaaaaaaaaaaaaaaaaaaaaattcaacattttcaatttaaagatcaaaaagctcacaaagtcaactgagaatctctggggtagaactgataagagatacaatcaaatttatattcatgtgacttgatggcttctctatgattaaatacattttctttgtacattttaaaatatatatttttttgagagagtctcattcagtataagcactgctcgaaaatttctaatcacttttatgttgttgtaagactaagatatatttgtagtgaatttttaacatattctctaaaaatgtttctacacaagtgtcacatgggataggaactctctaggaaaccaaatactatactcactttgagattacactggatattttatcagcctagtctatgaacaaaacactattacaaaaaatgttaaacaaagtaaagggaaggtaggacattcaagatataatttattaaaaggtaggtttattaaaaggaagcaacaagaaaatgttcaggccaggagcagaggctcacacctgcaatctcagcactttgaggggccgaggcaggaggatcgcttgagcccaggagttcaagaccagcctgggcaacaaagaccccatctcaacaacaaaaaaaaagttgtttttttttttgtttttttttttttttctgagatggagtcttgctctgtcactcaggctggagtgcagtggtgtgatcttggctcactgcaacctccgcctcccaggttcaagcaattctcctgcctcagcctctcgagtagctgggattacagtcacgcgccaacacgcctggctaatttttgtattcttactcttgacctcgtgatccgcctgctttggcctcccaaagtgctgggattacaagcatgagccaccgcgcccggccaaaaacgttttttttaaattagctgggtgtggtggtacacacctgtagtcccagctacttgagaggctgaggcatgaggatcacttgcacccaggagattgaggctgcagtgagccctgatcatgtcactatactccagactgcgcaacagagcaagaccctctctccagaaaaaaaaaaaaaaggaaaagaagaaaggaaagaaaaagaaagaaagaagtcatcaaaatttcatacttttataatagagtcccacagatcttactgcttactggattagatttttttaaatccattctgaattctgttgttctcaagaaactggctgggggctactggtggtcaagacatattccctaccctccaagatttaaactctaatctagtataaatgggtgtggaggtggagctagagggtaaggaaaccactacataccactaccgagccaggcccacagcagtaaggaccttaggggatgtaccaagtattatgtgttggggaaatatgaacagccagtggtctacaagcactagtgtaagtatcacatgtagctccagaaagttagcagcacagattgtcaataacctggcacaagctttataatttcattacatatttacaatatcaagttgcaagtcagtcccatcaacaaatcctaataaagtacctcaataaatgacaggcttccatcatagtgagaactcaatcacgcttgttacatcgggatgcccgccaagaggtacaaagcctgccctggtctctatttaccactgatgtttcctttggatacaattcatttacatttagattatttagcatacaggcatcaaagacatctggtcttgattggaaacatcaatactgctgttctcttaattatattcttaatagtacttgaagatgacaactctaagttttttaagcttaactgtacagaagagcatacctctaaaaagttagctttacacaaattagattaaaatgaaaatcaaaaccaacgttaaaataagcttgtccctgcattctttctcaatcccctcactgcagtaactactcacttcgaaaaaatcaaagattagttccaggttatctggttccatcgtctgtatgctgtactctgtccaacgatcaggctgcaagccataaccacactccggctgtgaatgcctgcacttgaactcattgtcgcttattaaggatatctccaagctattggacattttgtggagtacagtgggagataccctatcatcgtcatcttcctccaggccttctagtgtcagcttcaccctacgtaataaacaaaataatgagatgcaagaagtggcagaaaagaaaaactcatacaaatgttgcctaaattctacattttaaagtgcccccaaatatgctaaatcttcgaataacaaaaataatgtattatgcaaagattacacatactacaggttaaggaattaggtgtgttttataaaatactgatgttattatctacacatatttttgcaaagtattaaaatgggataaatgaccattatgcctactaaggttgttgattctttcattaaaaaaaaataaataaatctagggctgggccagtggctcacgcctgtaatcccagaactttgggaagctgacgcgggaggattgcttgagctcagaagtctgagaccagcctaggcaacatggtgaaaccccatctgcaaaaaatataaaaattattcaggcatgtgtcacatgcctgtagtcccagctactcgggaggctgaggtgggaggatcacttgagcgtgagaggtggaggttgcagtgagccgagattgcaccactgtactccaacctgggtgacacggccagaccctctctcaaaagaaaaaatatatatattattaaacacatataatattcaaaaattttttcctgtgtggaaaatttttcattttcaagacacaataaaatttagaacactgaagaatacttccaaaaaatattttctctttatggcattcttatgtagcagacaatcatttccattatatcaattttttctttttttgagacagagtctcgctctgcctggaatgcagtggtgcgatctcggctcactgcaacttccgccttccgggttcaagcgattctcctgcctcagcctcccaagcagctgggattacaggcgcccaacagcatgcccagctaagttttgtatttttagtagagacgtggtttcaccatgttggccagtctggtcttgaactcccgacctcaggtgatctgcccacctcggcctcccaaagtgctgggactacagttgtgagccactgcacccattggcctcccaaagtgctgggattacaggcgtgagccaacacgcccgacacattatatcaattttacaacaaactattgctacactatgaaaatttaaatagaaactataaaaatacataagcttagaaaaccacttatctatataaacaaatgttttctggttctacatgtagaaattaagactaactgcaacagtagcaatctgagcggggataagtagttcactattacaaagccctgtagttactagaatatgtaacattatcccaaactgtacacttaaaggctaaaaccaattgagtctgaaatctacagcactagtgaaaacaaatagcctaagtaacacataaacatggtcatacctaaatctagatttttttaattttttcttggttattgacacaggaggtttttcagaataatgcaaacgtaatcttatttcagtctgacatgtcagccatccagaatccagagtttcaacaccatctgacagaataaatatgaagaacagtaattattatacatgtttttttaaacaacacaataagtacctataggcattgataattctagttcacattcactttttttttttaacctccaaaggaaatacattttttaatgagatctaatccatgatttgtttcctaaacccctgcctaaaccgttgttcatattgcaaaccaagggtgacaaaggtaaaaatctgaaggaaaacaatcctttcagcaaataagtatttttagaataacaataaaaaaagaattaacttttcctttctaaatatgaaaataggccgggcgggcatggtggctcacgcctgtaatcccagcactttgggaggccgaggcaggcggattacgaagtcaggagattgagaccatcctggctaacacggtgaagccccgtctctactacaaatacaaaaaaaatagccgggcgtggtggcgggcgcctgtagtcccagctgcttgggaggctgaggcaggagaatggcgtgaacccaggaggcagagcttgcagtgagccgagatcgcaccactgcactccagcctgggcggcagagcgagactccatctcacaaaaaaaaaaaaaaagaaaaagaaaataatcccaaaataatgaatcattgtgaacaggcagatttagaatacatatcccaaagaccttcagaaaagatcctggttctatcaatatcatctttgaaaaaaatctaaaaggaatcaattccattttttttttttttgagatagagtcttgctctgttgcccaggctagagtgcagtggcacgatctcaactcactgcagactccacttcccaggttcaagagattctcatgcctcagcctcccaagtagctgggattataggcgcccaccatgcccagctgacttgtatttttagtagagacagggtgtcaccatgctggccaagctggtctcaaactcctaaactcctgacgtcaagtgatctgccttcctcaggcctcccaaagtgctggtattacaggcatgagccacctcaccctgcccacattcacactgtaataatacattgaggttacataacactggtactcttctccccaaagcaaatatacaggtagtcttaaattcttcattaaaatataacttttatatgaagtagggggaaaaattaaatgaatattaataattagctatactgtcacaacacaaataaattaaaatattcatattgaatccatgactaaaataatacaaatctatttcagaaagagcacatggtacaagatagcatctaacctagcaattgttctactagggatcactgttacacttccaaagcgtcactttagatattcagctgcaactagttatgccactagtgccgggggtgtgagatatcagaaggtaagaacagaactgtgagtcagagccatattctcaaatttatatattctgccataaataaactgcatgatcgtgacaacactgttggcattaacttgaagctactcacctacttaacataggtaataaaatgttcataaataccagagaagctgtcaactgttttggatctaagctttttcatcaacagagtcaaaataaataaataccaagaaacttctctccttagaaattctctcctaacttaagaatgcttaataattgtgggactttaactttttttttttttttttttttttttttttttttgcagaaaagacaagtgagaccatgcattacagctcaagcaaaaactactactccaggccgggcgcggtggctcacgcctgtaatcccagcactttgggaggccgaggcgggcggatcacgaggtcaggagatcgagaccatcctggctaacacggtgaaaccccgtctctactaaaaatacaaaaaaaattagccgggcgtggtagcgggcgcctgtagtcccagctactcgggaggctgaggcaggagaatggcgtgaacccgggaggcggagcttgcagtgagccgagatcgcgccactgcactccagcctgggcgacagagcgagactcccgtctcaaaaaaaaaaaaaaaaaaaaaaaaaaaaaaaaactactactccataaagcactccaaaacatgtagtgtaaatattacttatgaagtactaaagactccaaaacacttaacactaaagctattcaagtactgtacactgttttctgatgtaatataaacaatcccaaacaaaatcaaggaaaagatgtcaaattcctatctaaatactgccagagcatgttcatttctaccatacataaacatatatacctaataaaaaccacaaccaaaacattcaggcctgttctttcctgtgcttagcaggaaagcaaactggttatcagcaatttatctctgattcagagtcagtacaaacacaattccgcccacccgctttccaccttttgactcctacagtacagcatccaaaatgaggatgcaggctgggcatggtggcttacgcctgtaatcccaacactttgggaggccaaggcaggcagatcacttgaggtcaggagtttgagaccagcctgaccaatatagcaaaaccccatctctactaaaaatacaaaaattagccaggcgtgatgacactcacctatagtcccagctactcagcagactgaggcaggagaattgcttgaacccagcaggtggaggctgcagcaagcggagattgcgccactgcattccagcctgggtgacagagcaagactccatctcaaaagaaaaaaaaaaaaaaagaatgcagtttagtataatagccctgatacactgtaagaattccagccaggtgcggtggcacacgcctgtaatcccagcactttgagaggctgaggcaggaggatcacctgaagtcgggagttcaagaccagcctgaccaacatggagaaaccccgtctctactaaaaatacaaaattagctgggcatgcctgtaatccaagctactcaggaggctgagacaggagaatcgcttgaacctgggaggcagagagtgcggtgagccaaggttgtgccatcgcactccagcctgggcaacaggtgcaaaaactccatctcaaaaaaaaaaaaaaaaaaaaaaagaattccagtcacccagctgggcagtggctcacacctgtaatcctagcactttgggaggctgaggtgggtggatcacttgaggtcaggagtttgacaccagtctggccaacatggcaaaacctcatctatactaaaaaaaaatacaaaaattagctgggcatggtagcaggcgcctataatcccagctactcaggagcctgaggcaggagtatcacttgaacctcagggtcggaggctgcagtgagccgagactgcaccactgcactccagcctgggcgggtgggggtaagaattccagtcactgaagaaaattagaattctcaggatatagtatttactaaaacagaaagtacacaaataacattttcaacatattcagaagttaaagcattttctactctatctcaaactaacttttaaacattcagccagaattactagaactctttggttagtctgaattttactgtatatgcagatatacaaacacacaaaatacacaaacttagcctaagtgtaacatttcacactttagatatttagaaacattaatgtaatttcaaacataaaagaggtaaaaggctacattagcagttcagtatactacacacttttaattatataacatcatatacctgaaattgctagtcaaataaaaaccaaaaggataacattttaaagtgcaacaattatattagaaactaattatttaacagtagggatttgttttttggatccagtctctattttcaaaatcatactacagtcatgcattgcttaacaatgaagataagttctgagaaatgcacattagacgatttcattgttgtttgtgtaagtacagggaatttttcagcttcattataatcatatgagactgctgctgcacgtgtggcctgtctttgaccaaaatatcgttatgcagcacatgactgtatgttctattttcctgtgctatataactccagtgaaatgtaaagtaacaatctcaatcatttcagtaaacatttaagtaagtcagtctcacttactgtggattccaaattgtccatcgtcaataataatttcgctttctagaatttaaggaaaatagaaaatttagttaaaactcttgatgcatacccagtgaacaactgagaaattacccaccttaaagatcgtttataatattaaatctacagcttaaaagcagcccaaggtgaataagcatatttattgtagccctcaataaagaattccctttaaaggaggctagcaaacagtaatggttcttacatacttcgttgattgtccattatgttaaaaagaagaaaaagaaaactcttcagaaaggtgctctagaggcactgggattaacttctacactaaccaatgtacaagactcacaggttgctggacaacgataactccttcttgattttcaaaccaaaggtcttggcacaattaaaatgcttattcttatgtagtgcatattctgaacttgtctcaaatgtaattctcctcatatcccaactattcactactgccagttaaaagctttacgaacagcgtgaacttacctgtatgtacagagctgtgaggaactaccaaaagaataaacgctagcacaaccccttctcctaacagaaatttcaactcaatgagaaaagctgtaaaaccccaccctttgagtaaaatacaatttatcttcctggcctacttcccttcccagtttactttaaacgttagtctgaaatacttgcaaaatggatgtgacagttcctagtaaagattctctggtaagtttcacacagcttttaagttcaaaagttatatttctcaaaagtatacattcctttctaaaagatagaaacaaaatcatcccacttctcataataaaatatatttaactgcaagatgctttaaaatacaattttttaaaacattcaatacctagtaagttccaacctcagtatgggaatattataattttaagtatactctcataaaaatcctaaatacactatcaaaaatgtattaaaacatacaaaaagaaaatccaataaagaggatggaatgagatactgtttaaatgagatgtgtccttactccaggataaagcagaaactcccactgctttctaatttaaaccagaaaactggcatccagttatctttcaattttaactttacctagaaactaaaagatacatttctcagcactgagtcaatttacagatgaatacatgtgggtaatttaatgtatgtgaagtgaacttcaaattcgattttcaatatggactaagaaattcaaaaatacttgtatgaagagaaatgccatatttaagcataagaaaagttaatgtgtttaaaagaaaacaacttacaaaaaaaaaaagacaaaaaaaaaaaagaaaactttccaagtagcaattctagcatagccaatagggaatttaagaaatttgaattcattcatacaagtttattcaagtatttaccaatttctcttaaaaaaattaagaagaaaagaaaaaatagaataacttactctattaatattcaaagttaaaaatttaagaatctttgttttggattaattttttcttcaaatgttcgttaagcctgagcaagtaaacaaatagagctatggatgctcagtcaagaagaatggtatcttataaacttcctaaccattccaaatgaaagtgaatatttcataataaactaatctaacccaagaaaacaaaaatatctaggtaaatatttctaataaagtttattttaagaggcaattaaaaactgttgttttgaaagatccatgaaatgctcagtgaaatttgtagcactgacaatgcattgaccttaactttagaataaaaatttattaaatcccactaagccattgtgcagcatattagtaactttatgcatatgcctcaaacagatgcagttaatgcccatacctaaaggggttattgatcgtggttgtagatgagtctcccacttgtgaactatcacttgacatggaccaccgatagtctgcaatttaaaagttaaacgtctgcaataatttcttatatcttattttctacccatgactccattagatgtttgtggcctaaatcttatactaaatatgagaccaaaagattcatcttattatcaatattatatgccaaaagcctggaatgtaccagatcacaaaacaagatgaaatgctggaagaaaattagagtgaggcagtaaacaaagaaaaatgagatgaactggcacacagaactgtctcaaacccattcctaaatctgcctacaatactcaattgtttcaaagaaattttcatttttaactgatattaattcttaagataaatatcatatatactttctttggtatgtcagccatcaatgaggtattgctagataaagtatgtacctcctgctctatgcatttagaaaaagcctaaacaagcctacaatagtaaaaatagtaggaacaagtactcaagaacaattatcgcaagctactcaaggaactaaagaaccataataaagttatttattacatatatttaagaatactaagtgaaaaacaggaagatttctcatatcataggaaccagtgtttctaaagaacacgggaaattctagaagggacatgtggccaggtaaacttgaagagcaagtgtgataaaagaggaactaacatccggtttcattcttatgccttagtttaaaatctcatacagtgtgacaattcctcatactgttttccattatcaagctcccctactaaaaaagaacataaagctatgtgttgataacatatgcggtagtgagtaaccatgaaagattccctgagtatacctaaaagactaaaatttaagtgttctaattttcctttaatttttaaaaagaaactcactagttattatgctgaaataaaacccttaaatacacattttggaagcacattttcaaactataatcttacaaggtattttatttgttacataaatgtaattaaatacagagaagcaaaaagaaaatacaaaactcacccatatcataccatttagggataatcaccatcaagattttcacatataatctttgagcccttttctaggcattatattacacatactcttttttttttttagacagagtctcactctgtcacccaggctaaagtgcaatggcacaatctcggctcactgcacccttgcctcctgggttcaagtgattcccctgcctcggcctcctgagtagctggaattaaaggcacgtgccaccacacccaggtaatttttgtatttttagtagagatggggcttcaccatgttggccaggctagtctcgaactcctaacctcgtgatccacccacctcagcctcccaatgtgctgggattacaggtgtgagccactgtgcccagcctatacatactcttaaaaagcctaggcataaaagcttctctattatctttagaaggcattaataatggattaaaatattctcctacactttctataggattttaatattgattaaatttgacgataagccaaacaataacaaatatgtaacaaattaggcacattattaattattaaatgcaataaataatcctgtcacttaaaataaccaggctaaattcttttctgaaatcctcaaacttctgaagtttaaaaactaaaatagcacgatatatttcttcaaatcattactcctgggatactaaataaaattctctttttctctagctaaacacttccctgctataatagttcaccttaattggtagactgggtagattttttaaaaatgtaatgtgaaattgctcttttaaaaatatggtgactttcgtatccattatactaaaaagaaaatcaaattaattctagatgatgtttactataacatttttcctgaaatattttttaaatgtgttttttaaatatcaaactttctaaacctcaaaagttgcaaatataggacaggcatggtggctcatgcctataatcccagcgctttgggaggccaaggcaggtggatcacttgaggtcagcagtttgagacaagcctggccaacatagtgaaaccccatctctactaaaaatacaaaaattagctaggtgtggtggcacacaactgtagtcccagctacatgtgaggctgaggcacgagaattgcttgaccgtgggaggcagaggttgcagtgagccaagatcacaccactgcacttcagcgtgggcgacagagtgagactccttctcaaaaaaaagtcgcaaatacatacataaaaatagaaacagcctgggcacagtggctcatgcctgtaatcccagcacttagggaggccaaggcaggcagatcacttgaggtcaggagttcgagaccaacctggccaacatggtgaaaccccatctctaccaaaaatacaaaaattagccaggcatggtggcacacgcctgtaatcctaggtacttgggaggccaaggcaggggaatcccatgaatctgggaggcggaggctgcagtgagctgagattgcgccactgcactccagcctgggcgatagagcgagactatgtctcaaaaaagaaaaagaaaaaaaaaagaaaaagaaaagggtgctatgaatataatattaaatgtcaaaaagaggtaacggcatagcagactgtttgttttgttttaattcagatgtcaggggaactttatagactgttgatagcagtatctttacttaatcaagtaagaataatcctttggattaaatttgatagggaacatatttcagtagcaattttaacaactccagtctcatctgcccactaccccactgcataaaaccacctagacttgaatagaatagcatatttgaggaacagtccaaagggccaggtaaactgatgacagaactatgtctatcatcattcagactagaaatgtacattggttggtaaactgttataatatagaaaaaaaagaacctagttttaaaatacactgaatttccaaaattgttaagcctactttattaaactttagaaggcaatcttaaattttcagctttacttctttaaaaaaaaattaacaggccaggcgtggtggctcacgcctgtaatcccagcactttgggaggtcaaagcgggtggatcacctgaggtcgggagttagagaacagcctgaccaacatagagaaacctcatctctactaaaaatacaaaaattagccgggcatagtggtgcatgcctgtaatcccaactactcggaaggctgatgcaggagactcacttgaacctgggaggcggaggttgcaatgagccattacactccagcctgggcaacaagagcgaaactccatctcaaaaaaataaataaaaactaacaactgagcactgggaaattcaaaatctcagtgataaccccaaaacatgcaatcctttcatttattttttaatcctggtctcattgtacatgcaatactttctaatacattatctgtaataacttattctttaagatctaagaaaaggaaacagttctgaaacaaaacattctggaaaagtctgccaaaattttaagctttttggagtaacatgggagatagatctttggagaaaaaagtaatgatgtcaatctaagacaatattccattaacagtactggtagagctatttcacaatttagcatacataatgtcacacgactgtagaaatgtttccaaacatgtatattaacaaaaatatttttaaaaatttcttcccacaagaataagtcttaatgattgttttcttaaacagttactgacatcactcagttataccaagcactgaaatttaaataagactatccaatatgtagattggaagtttgttttttaacaaatcaccaagcaaaattattagctagccatgtaatatcactgcttgcatatatcacaaatttttaaaacttttactgattgtttttcttccacaattttgaaaacaaactgaatgtaaaagggggtctgaggaatcaaggccacgtgcggtggctcctgcttgtaatcccagcactctgggaggctgtggcgggtggatcacctgaggtcaggagtttgagaccagcctggctaacacggcaaaaccctgtctctactaaaacaatataaaaattagccaggcatagtggttgcatgcctgtaatctcagctacttggaggctgaggcagaagaatcacttgaacccaggaggcggaggttgcagtgagccgagatcgtgccactgcactccagcctgggcgacagaacaagactctgtctcaaaaaaaaaaatctctatttttagtacaaccagtaaaagaaacagtcacctaggcatgagtaaagcaaaggaagctaggccaacagactctctgagagtattcaaatctcaagttaacacctgacagtatttactattcagaagaattttagatactaataaactattgtacaaaatgacaaactagactattctgaaaataattatctatcgcaggtgactgattgtcttgttaaaggaaggacttaaaactcaagggagatcgaggtcaaaataagatagtttgtaatgaatctaattatgagtgaatgttagcagctatgaaagttagaaacatagatatgtgctgaaaaataaagatgtatttctacaaaaatgaaggaaaaatttcaaaggatacaatgaaaaactggctaacatttgactatgaggaaacatccctaattctacccacaagcaaagaggggtggatacagaaaaaaaaaagttgaaattacatgttaattcagaaagtatctttggtgaagatgtgacatcagtggactacctgcagattcataccaatgttttcattccaggaatactcactacttttgtgtgctatgttcaaataagatactattttgttttgtcatctgtgaaattattttaaaatgtaacacattaacaccttatcttaattcacaaagagaacacgtcattgtgaaaaactgagaaaaacgatttcaggactcttctaaactaaaaggaatatgccagaaaaagcagtgcatggaagaaaaatgaatggtaaaatttcatttactcaataaaattttgcaatgaaaggatctaaaaatctgtagttcaaaccttttgttttatagatgaggaggctaaagcctaaaggtcaactggcttgtccataatcgcaaaacttttagctttggttccaaaactgcctgggtagattacctcctaaaactttcaacacagtaaaattaacctttctcccatttcagctttttaatgctttcattatttgttttcctatcattctttatattcgtaacattatgtattccaataatttacatcatttcacaatttaagatgccttgcacattacttctattatttgacaatgtacaactagacaaagtttcataatacttctattaaaaatgttttatttaaaaagcgccaccaacttttttaaagtgtcacattaagctggcatgtggagaaaaaaactgtagccatatgcatgggattttatgtagctatttactcgattccatgaaaaacatacttaccatggcagcccctgcatcacacggtacatgtgtacacgatacagagcacctacttaaagaaacacactcaccaacacatactgtaaacttttgcaagtattacaaggagaaaaacttgtttttactgttaagcagacttcttgccaattttttcaaaaggtattttggactgatctgctgcttttggtaacattttcaatgaagaggataaatacttaggttggcttaatttgacctgtgttgacaatagtcttactttagaaaactatgcccaaagaactcattatcatctttctcatccaaactcccctaagtaaaatttagttggtttcacatattacaaagctaaatttcatataccaggatcctcaggtaaactttccatatctatgacctatgtatctacacacaattgcttaagttatactaaagaactttaccatgatgcataaccccatgccaaataaatgagatgcccttttcttaagttaaagtgaaactattgtcaagaaaagccaacacaatgatcaaccacaatgtaatttaagttcaattactgtgtattcacaaaatattcttggaacaagaaacgtaataggtgcaaaagacagctaaagtgggtttgtcattttttgtcattttgtctcttttctttgtataatggtggctaagagcacgaggtaacagtggctgcttgcatttttcacacgtaacaaaaacacttaatgactcccaaaggaaatacattttttaacaagagctaatccatgatttgtatcctagacccctgcctaaacccttgttcatatgcagcccaagggtgtcaaatgtaaaagtctgaaggaaaagaatcctttcagcaaataagtatctttagaataaaaggaaaatgattaactttttttcttttctgaatatgaaaacaatcccaaaataatgaattgtgaacaggcaaatttagaatagatatgccaaaggcctccagaaaagataggggtcttatcaataacatctttgaaaaaatctaaaaggaatcaattaaattttgatcagagttaacacagccactaagagatggctgctgtgaaataatttttttaattactcacttaaaacaggctatatacttctctaaatgtatttacatcacataaggattaaaaaacaaaaccaaaagtaaaagctctgcaagtggttcctaactagtttacaaaagttaccgaaaatgcacacttacagagaacacattaaaaccaatttcataagaatactgcagaacatacttactatgtctttttaaaattccatggcagacatcatctgcctctgaagtggctacttccttggttttggtaaattttattaatcaagagttctattccttatttgaccaaagcaaatgcattttactttgaacgtgttcaaacttaagtgagttgcttttgaaggaagtgctaaaggaattggaaactagataaagaaaacatacctttggttctaaaaagtaccctttgaagtagcgatactgaactgatactcctctactgagtacaatggttgctttccatagcatgctgtgaagaaagaaaattaaaagcagcagcatcaatatcaaactacagtgcataaagacttcttaattcacaaaactcctcaaataaaacgtatgaccaatatcacttatttattcctacacaaaattttacaggcctactctgtagcaggcaatgggaacacaggggtatatactgcagaaagagccttatcttcaaagagcttcctttgctgtgtgggtagacagaaaaataaccaaagaagatagacagaacgaagttctggaggaggcttttaaaaggaaggaaggttttaatgaggaagcgctgtctgagctcaggtctaaatgatgagaaggaaccagccatataaagagccaggataagtttccaaacagaaaattcaagttgtacaaaagtggaagccagagtcagaatcttctgtgacttcccacttagcgagggatgttacatggctgataagagactttgggtcgcagcttttgtgtcacaaatgagagataaacatgagttacactcctattcttgactatccgttattctaagctgtcctacccaggctctggctattcctcagacaagcagtcagaacctgtatcttgtttcaggccaatgtctttctctgaactatgttattctaacagaaactaaagatttgactcaacagctgccttaaggtcaagaattcactacaattcattactgtaactgagttttagcttcaaataataaactagtgctatccacagcatggtcccagaccatcattagtagctgggagcttcttagaaatgcaaattctcaggccctacccagacttattgaattaggaactctgggggtgggggcccagtaacctgtattttaacaagcctccaggtaacttttttttttttgagacggagtcttgctctgtcacccagagtgaagtgcagtggcgcgatctcagctcactgcaagctccgcctcccgggttcatgctattctcccacctcagcgtccccagtagctgggactacaggcacccgccaccacgcctggctaactttgtttttttatttttagtagagacgggtttcaccgcattagccaggatggtttcgatctcctgacctcatgatccaaccgcctcggcctcccaaagtgctgggattacaggcatgagccaccaggcccggccgcctccaggtaacttttataaacactttgagaacccctgtcatagaccattaaccaaacgttaattcagcatgagtagtttagccctacctggctctgctaagacaggttttagggcattgtccttactctgatacaagcttagctcctaaaataaatacagatatagctcattgtattgcactttattatacttcacagatactgtgttttttacaaattgaaggtctgtggcaaacttgagtcgagcaagtctatcagtgccattttcccaacaacatgtgcttacttcgtgtctatgtcacagtttggcaaatctcataatgtttcaaacttttttgttattattatatctgttatggtgattgcatgctacagaaaaatctttcatgaaaggaacagttaatcaatgtagtaaacttcactgtcttattttaagaaattgacactgtccttcaaccttcagcaaccacgactctgatcagttagcagccatcaacattgagacaaaactctccaccagcaaaaagattgcaattcactaaaggctcaaatgattgtatcattttttagcaataaagtattttttaattaaggtatgtacatttttaaaaatcactgctttaaacaaaccaacatggaacatgtatatatatgtaacaaacctgcacgttctgcacatgtaccctagaacttaaagtataataataaaaaataaataaataataaataagtaaaaatcactgctttaaagcaagaatagcaaatgctgccaggcgtggtggctcacgcctgtaatcccaactctttgggaggctgaggtgggcggatcatgaggtcaggagttcaagaccagcctgaccaacattatgaaaccacatttctacaaaaaatataaaaattagccaggcgagatggcacaagcctgtaatcccagctactcaggaggctgaggcaggcgaatcacttgaacctgggaggctgaggttgcagtgagcccagatcgcgccactgtactccagcctgggtgacagagtgagattccatctcaaaacaaaaacaaaaacaaaaacaaaaaaagaatagcaaatgcttgacacatgttccctatttttccccaataagcctcagaatccttttcaacagaggtttccaggtggactcttccaattaagaatagaaagttgccatttctgctaccccaaaaagaaaaaaagggggggggacaaattcccagtactacctcatctccaaaacagccagttggagcatgtgaaactagccccactagtgcagagtagaattactaataagctgtgaaaaacgtgctgccgcctctccctcagccattatttctcaatctccaggagcaggatctaggtatgtgtattttttttcaagtcctcccaagtgattctaatgcgatccctggtaaagaaccactaaatgaaaacaagagatgaagaaggcaaagcagtgagtctttttactccacttgtctaagcaaatgtggcaaatttaagaatgaaccagaacccaggcatagtggcttatacccagcacgctgggaggctgaggcgggagggcagcttgagccaggagttcacaaacagcctaggtctcaacacagtgaaacctcatctctataaaaaaattttaatgagctgggcatgatggtgtacacctagctactcgagaggctgaggcaggaagatcaccggagcccaggagtttgaggttagagtgaaccgaaatcgtgtcatcgcactccagcctgtgtgacagaatgagaccctgtctaaaaaattttaaaaaaagaatcagaactatttggtgaactaaagacaaaataatctgatgaaattaaatcaaaaccaggaaagacgggtagtcatatggtggtttagtgcagctgcctaattctgaattgcccttatatcctttcccaaaataccataaaatctacaaggagggcaaatgaaaccacaagtgacccacatcttcagcagtattaggaaacaataccatgaccttcaagttttctctaagcagaaaaaaattccaggagagctctagctgccatgagcctgtgggtagggagagctggtaagagaaagcttaagacgctccctgaaagacaggggcacagcagacttagatgcagagcacattaaaattccaaagaaacacaattttaaaactcacgaatattgtctaaaggcacatggattcctgtgtatctactcccttctccctgtgaaacactgtttatctgctacctgtgaatcaattctatttcattgtacatgcacaacatatgaacaactggtcctcttaaaattgttaagtgtcttatcctgttcacatctttttgaccaagttggctgaaactgacttaggacaggcaggggtgtgttttagagacaagttcagaaagatatgaggtttcacttcagaccagagtggctgatctgaaaatcgaagaaaaaatagccacttgaaggaaatactagtctgtgaaagactagtaaagaatatatactattaaagtaatactatttaccaacagaactcttataaggagagctgagaattggctgagaaaatatgtcatactagtgacaaactagaaaaaagggagttctgtgttttttaattttctttctcctagcttacattactgttatttttttactttcctttgttattttccgttgctttaccaccagtgctcctcaaactatttgctgtgaatgaccagcattttttgtttgctttactcaacctgtctggtgaccaatattctgatctacatacccagttcaatgagatgtgtccacagtgacatgcatggagtcaaactgctatacacatttctaaatgcttgctctcagtttttgtatttctcacatcatggattgatttttttaaaagtcttttggactggtactggtgcacaggccacattttaagacatgctgctctacaggaaaatagagccttagcaatcacctaatcgggcactggatatacttgtatgctatttaggaaaacctataacacttccaactatccacagtggggtaagtgccacctctgctgacatccactcatctatgctaacccctttttatcatgcagatgaggtaactgaggcctacagacatcagccgcccaagttcacacttaactgcagaagagtggctgacacccagatttacctttctccatccactgtgcccatactaagtttactgatggattcaatgccactagtgaatacatttcttcatattagctaagctatctaagtatgtgttccactctctgctccttttaacaccacatacttcaaggaaatacttttataggcaaatacaaaaattagatctcttatcaagaatatgtacttaccattaaaaaaagaaatcagaaaaaattaaaaagaagaaaataatatatagtgaccagacaaatgttaatgccttaaaatgtttcttcaaataagaaagcaaggtgggaggatctcaagtccaggaatttgagatcagcctgggcaacataaccagacaccacctttgtgccaaaaaaaaccccaaaaaacaaacaaacaaaaaagtaatgccatctccacaccaaaaacaaaaaacaaaaaaacaaccacaattaacaaggcatggtcatgggtgcctatagtcacagctactcaggaggctgaggcgcaaggatcgcttcagcccaggagttcaaggctgcattgagctaggatcacaccactgtactccagcctgggtaacagagtgagaccctgtctaactaattatggtggtaagtacctaaagaaccagtcaagaattaaaagtatattcaattatcctgagttgtaaaaataaaaaatacatctaaaaaaaaaaaaagaaatgaaagtggttgagaggcagggattaacagtaagagaggaacctgtttttcccacacaaattttgtaaaattatttcactcataaaactatgcaacgtgataatgttgataaaaattataactaaaagaaaaaataccaagatatcttaaaagcccctaacatcataaggttaatgtcacagttattctgtaacctcacatttccatactcacctttcacctgtgtcattctctggaagaagagccacagcattttgaggattccagtttcccaaagcatcacagcttccacatatcgcaaaaacttctcctaaagaaacagaacaatcagtcacagagaaacagaacaatcagtcacagtgggataagcagggaagtttgcattagttcaaccagatatgctgccccctttagcagagatgaaagagcctcactagatataggtttgggcccaggtacctaccactcactaacacctgccaattaactcgactcacctttctagaaccaaagccagagaaaagggggaaggcatacggatgaagttttcttcatctgttcaactactcattgagccagtaacaagaacccaagagtacaaaagggataaaaccacagtctctgctttcaagacagcttccaattttaacagacaaacactaaatgcctatcagtactctaaagggttattaatcaatattttctagaaagtcaaacagtagctactaataagtttcacatcaagaacattattaaggccaggcgtggtggctcacacctgtaatcccagcactctgggaagctgaggtgggcgtgtgggggcagatgcctgtaatcccagctactcaggaggctgaggcaggagaattcacttgaacccaggaggcagaggttgcagtgagccgaaatcacaccactatactccagcctgggcaacagggcaagactccatctcaaaaacaacagaaacaaaactgtcaatgagagagcagaaatgtaattaaaaacccatcaaaacaaagacttatatagttggaaaatctagtacttcttggtttttggagatggagtttttctctgttgcctgggctggagtgcagtgtcatgatctgggctcactgcaacctccacctcccaggttcaagcaattctcctgcctcagcctccctagtagctgggattacaagtgcgcaccatcacaaccggctaatttttgtatttttaataaagatggggtaaccatattggctaggttggtcttgaactcctgacctcaggtgatctgcccgccttggcctcccaaagtgctgggtttacaggcatgagccgccgcgcccagccaaaatctagtacttcttaactaaggtaatgtatcatttcttttgaacacttatcaatagactttaaaagccaacataaagctaccacctcttcttgctaaattttatatatttagcagaacacacttggataaaagtacgtagaagtctctgacttaaatatcaacacattctgaatacaattaaaattcataaagaaaaagataatgaactgagtccaactgccaatttggctcaagacagactcctccacattctgagaacagctgggattccaagcttgaggcactgctctagtaagactagaattgtactcagctttagccacctgcatgagcattttattagcttggactatctaaaaattaactaaaattccaagtgtgacagtcattcagatttcagggctctaaatacatgtgggccgggcgcagtggcccatgcctgtaatcccagcactttgggaggccaaggcagggagatcacttgaggccaggagtttgagaacagcttggccaactagcaaaaccctgtctctactaaaaatacaaaaaggccaggtgagattggctcatgcctgtaatcccagcactctgggggactgaagtgggtggatcacttgaggtcaggagttcaagaccagcctggacaacatggtgaaacctcatctctactgaaaataaaaaattagctgggtgcaagccgggtgcggtggctcatgcctataatcccagcactttgggaggccaaggcaggcagatcactaggtcaggagttcaagaccagcctggccaacatagtgaaaccccatctctactaaaaatacaaaaattagctgggtgtggtagcaggcacctgtaatcccagttactcaggaggctgaggcaggagaatcaattgaacccaggaggctgaggctgcagtgagccaagatcacaccagtgcactccagcctgggcgacagagcgagactcttaaaaaaaaaaaaattagccgggtatggtggcaagcacctgtaatcgcaactactcaggaggatgaagcaggagaatcgcttgaacctggcaggtggagggtgcagtgagccaagatcatgccactgcacttcagcttgggtgacagggcaagactctgtctcgaaaaaaattttttttaaataaaatagataaaaacacaaagttagctgggcatggcagcacacacctgtaattccagctactcgggaggctgaggaatgagaatcacttaaacctggggggaggtagaggttgcagtgagccaagattgcatcactgcgctccagcctgggcaatatagtgagaccctgtctgtacaaaaaaaaattttaagtaagaataattttaaaattagccaggcactgtgttgtgcacctatagtcccagttcctcatgaggttgagtcaggaggatcaccagagtccaggagtttgaggagctatgactgcaccactgcacttcaacctgggcaatagagggagaccctgttaatctttttttttttttttttttttttttgagatggagtcttgctccatcgcccaggctggagtacagtggcgcaatctcagctcactgcaacttctacctccagggttcaagcaattctcctgtctcagcctcccgagtagctgggactacaggcacgcaccatcatgcccggctaatttttgtatttttagtagagacggagtttcaccttgttggtccagttggtctcaaactcctgacctcagatgatccacccacctcggcctcctaaagtgctgggattacaggcatgagccaccatgcccagccaaccctgtctcttaacaacaaaaaaaacttcttcatggactcgttatttctcatcccccacataaaacagcaggctactttttgctatgaaaagaacaaactccaattggaaaaagtaaaatggggactcagtggttcacttgcctcttataggtgctcctgcattttaccaattccccctgcaatgttactttctctttctgctgattccaggggaatatggctgctgaaaatgaggaaatttttcactaaaacaaacagacctttctttaattggctctcagttataaaagattatgaagacttgaatgcttactaaagaaatctgcaaacagcacctccacatactctatttgtatcctctcctggttgtacttgtttcccccaaggtcagtcctctctgcactaccattctcgccacatttagcagagggtccttcctcctgtgcagtgaggaaatcaaggtgatgggggaattgaggtggggtctcccccagtatccccttgctgtccctcagcctcctccttggcacgtacagagtcatctatatccacatccaccattatctccttccctctaatccctgaccccaatcaagctgacacttctgtggccagttctgcggtcagtccatttgcccgacatggccagctccttctagcttcaactgcctgcctacaactccccagaaagagaaaattccgtcttctctccacggaagtggccacacactaaaccagaggtgagcacttggctcaagggagccaacccatcagctgactagcaatcttcaatctgctcaattctgcccaggggtagaactataccagatcatcttggctaagaatttgaacttagactcacacatactctgccaattgctgtgatgaatgctagaataaagaagctagatgtagtgtgagtcattcactcattctttgaatacagatatactatgcccctgctctgatccaggctctctgctaggcgcaggaattcagcataaacaagacaaggtcatattttgaccaggcacggtctgtaatctcacacctgtaatctcagcactttgcggggccaaggtaggcagatgaccttaggtcaggagtttgagactggcctggccaacatggcaaaaccccatctctacaaaaaatacaaaaattagccaggtgtggtgtcaggcatctgtaatcccagctactcaggagcccaaaacagaagaatcgcttgaattcgaggagcagaggttgcagtgagccgagatcgcgtcattgcactccagcctaggcaacagagtgagactccatctcaattaaaaaaaaaaaaaaaaaaaagagggggctgggcacggtggctcctacctgtaatccagcactttgggaggccgagaggcaggtggatcacgaggtcagaagtttgagaccagactggacaagatagtgaaaccctgtctctactaaaaatacaaaaattagccaggcacggtgatggacacctgtaatcccagctacttgggaggctgaggcaggagaattgcttaaacccgggaggcggaggttgcagtgagctgggatcgcatcactgcactctagcctgggcgacagagcaacactccatctcaaaaaaaaagtaatgttttcaacagagtttacaatctgtcactcaaataattctataaaatctccaagaggtgctataaaatagggccagaacctagtggaatctggaggctggcagtggggacaggggagagaagagaaggaacagggggagtatgagagtgggcaaagatctaggcagaggaaacagcatttgagaacgtcctaaaagaggaagaaaggaggaaggaatggagcacatttaaggaactgaaaggccagtatagccagagtacataaaaccgagaggtacctcagttttatgagagcccaggtgtgatacggctttgacatgctatctcacactaaaattatctcacagcactttaagggacagcaaaaaatacaatgaggctaaaaacatattcacacataggaacaaggttatcccagccaattgtttcaccaacttattcttttttttttttttttttgagacggattctggctctgtcacccagggtggagtgcaatggcacgatctcaggtcactgcaacctctgcctcctgggttcaagcaattctcctgcctcagcctcccaagtagctgggattacaggcacatgccaccatatccggctaatttttgtatttttagtagagatggggtttcaccatgttggccaggctggtcttgaactcctgacctcaagtgatctacccgcctcagcctcccaaagtgctgggattacaggcataagccactgcgcccggcctaccaacttcttgcactagcaaagtttccttcattttcatactgcctagaaaccacagcccaaccatctctgccctgtgcaaaattaggtataaattcatagctttcttgggaaaacatgagaacaagacagagtttgaggaggtttttggtgtgtttactatgctccaagcacatttctgctgtcaggcaagacctatagatattttcatctaaaaaatcaggcccactctaatagcaactccatatttaaggtaatccagataagaaacatgctaatttaattttaattgttttaaagtaaaacttttacaatacctggtaaaagagttcctcttatttcaaaggcaacctgagaaggtgtcattctgatggatttattttatgatgtcgtgctaggaaaaaaaagaaaagtaacttatagtataaaaatatatgccttagctagccaccatcaagaaacaacttcaaccaagagctatttatatttttaaaagcaatatttaatgtctttgcagttttatggtgggattgtttttgtttttgttttaaagtaactttagtgcgggggggggggggcgggaaagaaacaagtgaaaaagcaaaaaaataaaccaggcacagtgcctcatgcctgtaatacaaacacttaaggaggctgaggcaggaggatgacttgagcccaggagtttgagaccaatttgggcaatatagtgaggcctcatgtctacacacacacacacacacacacacacacacacgccaggcatggggagcatgcctgtagttccagctacagattgagactgagctgggaggatcactttagcacaggatgttgaggctgtagtgagctgtgactgtgccactgtactctagcctgagccacagagcaagaccctgtctcgaaaaaaacaaaacacaaagtctcaataaagtttttttaaaaaaagcaaaaaatgaaaatgaatctcaattatgagcaaaaaaaaagattaatttcagagtccttatataaacagtgactcaattacttgggaagtatctagcaagtttgaagcctagtgctacaaagctattctttcagaatatatgttcaaaaagaaaacaaaacaagacagaatacatgcccgaaatacacactgtaaaacaaagtatccaaacttgttattttttaagtcgtcaagattcttttgctacatactttctcttctgataagcagctgttctgaattcaaggtatctttcctgaccagggtaatactgtggtagagaagaaaaacaactatagagagaaaaaagcttcacttaatgaatttctactttaacacaaaggaaacaaccaaagtatcacccactaaaacaaactacttgttatgttgtggaacaagtttgagaatctgcttctaagacacaatgtaacttatcattaaaagaaaaagaaaagaaggagtccaggcaagtggctcacacctgtaatcccagcactttgggaggccgaggagggcagatcacttgaggtcaggagttcaagaccagcctgaccaacatggagaaaccccgtctctactaaaaatacaaaattagccgggcgtggtggcacatgtctgtaatctcagctactcaggaggctgaggcaggagaattgcttgaacctgggaggtggaggttgaggtgagcccccccacctgcctccccctccaaaaaaaaagaaaaaactttctacacaaataacttttcagattttctctttattaaccctaggaccatcattactcaggttctacaggctcaaatttacagtctcaactctacctacaacctattatcaaatcctgatgattctatctaattgaccttatatccattttgtcaattaggattcttcctcacatccctggcttggaatcactttgattatttatagaaatctgaactccatagtaaaaggaatttaaggagattaaaaaaagaataagaaagaagtctaaactccaagcctttgaagttcttttccacttatccacattttgtctagctaattttttcatttcttccctgtcagtcaaaggaatctgtttcccatccactaacttaagtacctaaaggaatataaaaaatagcttaatacacacatgtacatataatatacttcgagatacttacataatttaaatggagaaagaacatactccatccaaagacacaccatattctacatcataacttctccaacacccctcaaaaaaacctttgccccccccaccaatgttacaagaattccaatcacatctttattctgcatcatgtacattactctaccagcttaaatttcatttgcatttatatattaccttatgaaacaattctaaagtacctttcatagctaccttacatagtcatttttctagttctgctttgctcccttcccctccccctgaatcatttaatgaacactgctacacacaattaaccacacttcccagtcaaggtagatagatctataccagcagttctcaccaaaggcaattcttccctccaggggattatttggtaatgccaggaggcatttttggttgtcacaactgggagtggcactcctagcatctaggggtaaaggccctgctgaacaccatacaatacgcagaacagccctccacaaatgattaattgtccagctccaaacatcaacagggctcaggttgagatgagggtcaagagtccaggctctatgttagctataaactatgtatcatcacatttacatcaattataaaatgtaacactgaatacatacacatatatatatttataaatgtacactgtcaaatattcatctcacagagtgcaagaccaccaatgtgcagtcatgtcacatttggatatgaaattccctatttggcaactctaccattttggttagaatacccaatactacactagtgcaaaccttccctttggccaggcacagtggctcatgcctgtaatcccagcactttaggaagccgaggcgggtggatcacctgaggtcaggagttcaagaccagtctggccaacatggtgaaactttgtctctactaaaaatacaaaaattggctgggcatggtggtgggcaccggtaatcccagctacccaggaggttgaggcgggagaatcacttgaacctgggaggcagaagttgcagtgagcaaagatagtgccactgcactccaacctgggcaacacagcgagactctatctcaaaagaaaagaaagaaagaaaaaaggccgggcatggtggctcatgcctgtaatcccagcactttgggaggctcaggagggcagatcatgaggtcaggaattcaagaccagcctggccaacatctctactaaaactacaaaaattagctgggcatgatggcacgtgcctgtagtcccagctactcgggaagctgaggcaggagaatcacttgaacccaggaggtggaggttgtggtaagccgagatcatgccactgcactccagcctgggcaacagagggagactccatctcaaaaaagaaaaagaaaaaaaaaaggcttcccttcatcaaaataatttctaaaataaataatttcttattctactttctgcatctaagagtaaacatggcggccaggtgtggtggctcacgcctataatccgagcactttgggaggcatgagaatcacttgaacccagaaggtggaggttgcagtgagctgagattgtgccaccacactcctgcctgtgtgacagaatgagactctgtctcaaataaaaaaaaaaaaaaaaagcctgacatttaaattactgaattaattttaagagagcaaatactctatcacccatcaaaagagctgaatgaccacttcagtcttaaccttaaccaaataaggtgccctttcatttggtgtttactgctgcggttctcaactaaagacaacctcatatacatgattaaatagtttgtattttgctatttgttgactaactttaaataactattttaatcaacttaagggaaatcagatattattcctatgtactaaaatcaacagctagtacaaaattatctctagatttctactgcatgaaagcaaatggaaaacttaagtaaatataataaaagggaaatgaactgattatagaaattgagtcttttattctcaaagatgtttggaagagtgactacagtaacttagcggtaaacagctgcagtaaatgtactatacaaagctatatacacaagcacaaaaacacctcccagaaaacctctccaaaagtcaacaaagcatcatcttccacttgatttaccaaagtcaagcaatctggtttgatttccaccctgagcgcccccctccccaaatttgataccataccaaataaaagcctcaggagctgttccaaatgcaattcacttgattatggacagaggccaaaagtctggtgcagtgttgtagtatacaattttggcatccagttaccaccaaaacagcagtgaccaagtaaaaaaatgactgtgttgtgaaacaaaaaatgtatgcacccacccatacaccttcttctaaacaaggaagaaaaaaaaaaatcacaacttggaaagggaaggtcagttctggatatacataaaaacaagagtaagatgaaaaatgttagtcattgtatgcacatgagctgaccagataatttaaccaactcgcctattacctcacatacagactacacttcctgaaacaggcttttgctttttggtttttgaaaacgtaacatctattctgtactttttgaagagaaacactaaatggcattctcatctgagattctgggtagtatttaaataaccctttttaaaagactcaagcaatcagcaaaatacaacatggtaattaatccacattttaaaaaatttcagagttcacactacctgccaaaataaattttactctattcttttcctcaaataaactttcccgacacgtgacactactgatttaccaggctgggaaaccaaagggatatgaagtaaaccaaggtaaagggacattcactttagagctaaattgaagtcagatatttttagctaaagtgtttttttggctacaaggaacatgtcagtcttccttcgaattttttcaaggaaaaaagctgtttccaattcttcttgccctttcccaggccttggcagctttgatcctcctaactagctaaataaagtaatatataaaatgcctaactttccctgagttaatttttgctcatcttggtgaaggatcattacgacccttgctacatttctgacaagttgtgactgtcattctgattcccatatacttgaagccaatatcttaatcaaatatgttaagacgttaatggatctttatttaaaaagtgtttctggaataagtttctttacgccaagttaattccttgatcaactttctaaacaatgcagtaacattttcccaaatgttttccattcattttaccgtgatattattctcttgtgtatgtttcataccttttttcctgttttaactcatacgtaaagattcgattcatcaacgtactttatgtacgtatcaaattttactcactttgctacgatgagttttcttttgtggtcattatttctcaagagtccagctttcccacgtcgttattttgcagatttaaattttgtctagaatactggttttctctagctcttggttcttcctagttcttaaatcaggaatggattgcaccatgtgcagttttgcttgtttgcttggtgttatttgtatccacgacattaggaattttgaaaaaaaaaaaaaaagactgataccttgtatttatttcttagttaagtcacagctcgtcagcaacgtagcaaggggaagcatgacggggtagagtagtgggtgagaactgtgcagaaatgggaggaggcgacagaagagtatgaagaaaaaacatcgggtccaaacatcctgctcagttccatcagttcctctatgcaggtctacatcagactaacagctgccttaaggtggaagaatcctctacaattcatgcccgatttcttttccagccagccagtggagtctggggagagggctgatgaggacacctaagtgattgaggctctctctcctacctcagcaaggcagtctgaagagctttgggaaaagtagagctttggagagaaggggcagcagacctaaaaaattgtatcgagggcactcatgactattcctggaaccttttcctaggaaaggcactttagtttcttggaataactgaattatacaagcatgccctagactacgtgtccgggcaatttcagaaaataagcagttgtcaaaacacggtgagtaacttagggacagagagcggcggtgagccgggggccgctgtggggcaggggatgtccccagaggacctcatctgcatttttggtgtctttgttccccgactcagtactctgcatatttgcggtagtcctatgctccacgcaccctgctactcctcaaatgctccacgtattttttagaagggaactaagccccaggcagcccagcagaagcgcggcagtgaacaataaaagtcgaagagtgcgtcccagccaccgatttagcgcagcgaacgcccggccgccgttcccctgcgggcagtggccggcccggcccggcccgaggaccccgcccgcgcctcggccccgacgccccaggcccgccgcgtcccgggccgccctgacagctcagcccgccacgtgagtggccgcccggcccccgcacccggctcgctgcctcacctccgggttcgctagtccgcaggtccgcgtcgccgccgccccgcccgagagcgaggaccgcgggcagaggtaccgggcgcccgccgtccgtgcctcgccagcgctccccccaggcggcctgccgcggcgtcgagcggcaggaagcagccacgctcaaaccggtttcagctgctccagaccaaactgccaggccaccccgcggggcggggccggagggcggtggggcgggccctgacgtcacgcccggcgccgtcccagccaatcggcagccgcgtgcggggggtgcgggcccgcgcgttcctggaaagggctgacgtacgcggccgagggcggccgggcatcccccgtgtccccgctgcccttctcagccgaccccggcgcccgcacgttggagagctgccctggggtcataggcttgtactgtggtccaccaaagccgccttagaaataacccacgtgggccgggcgcggtggctcacgcctgtaatcccagcactttgggaggccgaggcgggcggatcacctaagatcagagttcgagaccagcctggccaacatggtgaaaccctgtgtctactaaaaatacaaaattagccgggtgtggtggtgcacgcctgtaatcccagctattcgggaggctgagacaaggagaatcgcttgaacccgggaggcggaggttgcagtgagctgagatcgcaccattgcactccaacctggacgagagcaaaactccgtctcaaaaaaaaaaaaaaaccgactatggatcctggagctacaattcagagttgtattttttttccccatttgaaaacgggggaaattaccagtactgatgttttctagaaactttctttcgttgcaaaacagcaatcacacttggatcaaatcattagttgaaaactattaagtcacctaagctggatgagagtttatacccttgctacgcaaagtatggtcgacaagccagtagcacctgccagaactcagaattgcacactcccaggaccatcccagacctaccctatcaaatctgcctctagcaacatccccacgttaacaagtatgcaaattaaagtttgaaggaacttttttgaaagctgactctccctgccagagttgtagtttattttctaaaaaatgaaccgtatcaaaaaaaaaaatttttttttcctctcctttggtggtctccagaaagttaatcagcatttgccacttgaagttctcttacgaaactttgcaacttgcggggcgtggtggctcacgcctgtaatcccaacactttgggaggccgaggcgggcggatcacgaggtcaagagatgaagaccatcctggccaacatggtgaaaccccgtctctactaaaaatacaacaattagccaggcatggtggcgcacgcctgtagtcccagctacttgggagggtgatgcaagagaattgcttgaacctgggaggtggaggttacagtgagctgagatcgcaccactgcactccagcatggcaacagagagagactctgtctcaaaaaacaaaacaaaacaaaacaaaaactttgcaactcatctaacttacactgttaccttaccagtatcaaagttaccctctggttagtgtccaatataaaattatatcagcagcttttacttaaatcaagtgagatattgaaaagtaaaaagaggcctggtgcggtggctcatgccagtaatcccagtactttgggaccccgaggcgggcagatcatctgaggtcaggagtttgagaccagcctgggcatcatggcgaaaccccgtttctactaaaaatacaaaaattagccgggtgtggtcgagcgcctgtaattccagctactcgggaggcggaggaactagaataacttaagcctgggaggtggaggttgctgtgagccaagactgcaccactgctctcctacttgggtgacagctagactctcgcaaaaacaacaacaaaacaaaacaaaaaaccgactaaaaagaaccacctttcaggagatgtcgaagttctcttacaacaagacatagagaaatagctcgagttgcacgctagttcaaaatgggcctactgaaaatgtgtttggattagatgagctctagctttaggcagaatttctggttttataaatcggattgtcctctaccacatttgatatttagcttggattcaatcccagaaaatttctgacaatgtcatccattcagttaaataattaagtgcctgctttatgctaggctcaggatgcaatagttttttgatagtactcattttaatcccagatttcttaaagaattaaaattccttctggttatgtgccattacccattaaactctgctgtcttacatttgctacgtagtttggagtgaatttcctctgttagtcatacttcagtgacgaattttttcataagagtttgcttccttaaaatgtttatagatctttatttttcttttttttgaaatggagtttttgttgttgtttttgagacagagtttagctcttgttgcccaggctggattgcaatggcgttatctcggctcaccgcaacctccacctcccaggttcaagcgactctcctgcctcagcctcctgagtagctgggattacaggcacctgccaccatgcctggctaattttttatttttagtagagatggggtttcagcatgttggccaggctggtctcgaactcctgacctcagatgatccacccacctcggcttcccaaagtgctgggactacaggcgtgagccaccacacccagccagatatttatttttctataaccaccatttagtcaagatatttgcctagtgtttatagttccagttaatagacctaatccatgctccttccctaaatccttttgaaatgacagaagaattatacatattcaaaggatgccatcaatggccagagactgagaaatgtctataataggggttcttttggctcccctgggtcacattggaagaagaagaattgtcttgagccacacgtaaaatccactaacactaaagatagctgatgacctttttaaaaatcgcaaaaattttataaagttttaagaaagtttacgaatttgtgttgggctgcattcaaagccgtcctgggccacatgtagcccccgggccatgggttggacgagcttgctctaaaagatatggaacaagccagtaacattagaagaccggcagagaggctgggtgcggtggctcactcctgtaatcccaacactttgggaggtgaaggagggcggatcacgaggtcaggagattgagaccatcctggctagcatggtgaaatcctgtctctactgaaaacacaaaacattaaccgggcatggtggcacacgcctgtagtcctagctactcaggaggctgagtcaggagaatcgcttgaacccagaagacagaggttgcagtgagccgagatcgtgccactgccgtccagcctgggtgacaaagccagactccatctcaaaatgaataaataagaagactggcagagaaactatactcatccaagagaagaaggaattcctacagatgccattttacacagccttgcttagaaactctttgataatgcaatgtattttagattactccataatcgcactgttctgattgggatactgaagtagaatatagataattagaatataggtaatgcattcccacattcctttctcccaacactctgtgaaatgttaacttttcttttttctttttttttttttttgaggcggggtcttgctctgtcaccgaggctggagtgcatgatcacagctcactgcaaccctgacctcctgagctcaaaggctcctcccacctccacctccctggtagctaggatcacaggtgtgtgccaccatgccattatgcctgactaattgtttcttattttttgtatagatggggtttcatcatgttgcccaggctgaatttgaactcttaggctcaagagaccctcccacctcagcctcccaatgtgttggggttacaggcatgagccatggctcccagccataacttttcaaacatatggttaatgagatcaatttaggtcttaactgattacttccagaagagctccatatgttttgaattgtataaaatatttaacattcattattgtacttgattaaataatgaaatacgttacctcatttgtctgaaatcaggaccacaggatctcaccttatgcaatcattttttgaaaaacattagtagggagtctgagcctactctggctaaggaggctgcctgatttaaaaaaaagaaagaaagaaaaatggtagcagtccagcctgggcaacaaaaaagtgattctagctcaaaaaaaaaaaaaatatatatatatatatatatatatatatccatgtcagatatatggcagaatatggtggcaccagccagtagcactagctactccagaggcttagaggggtggatctcttgagtctgggaggtccaggctgcaatgaaccatgattgcacctctgcactccagcctgggtgacaaagggaggctgtgtctctttaataaaaaaaaaaaaattagcagtattgatgcaaaaaactctagacatagaagccagacatgggcttgaatcctaccctttacaagtgacaagtggcttttttttggacacagagactcactctgtgacccaggctgcagtgcagtggtgtaatcttggcccactgcagcctccacctcctgggttcaagcgattctcatgcctcagccacccaaatagctgggattacgggtgtgtgctattacgcccagctaatttttgtatttttattagagacagggtttcgccatgttggccaggctggtcttgaactcctgaccttaagttatcctccagcctcggcctcctaaagtgttgggatcacaggcatgacccactgcacccagcctgtgacattgtgaacattaatctttggtgaaaattttgctgctactggtttatgtatgtatgtatgtatgtatgtatgtatgtatgtatgtatgtatttatttatttattttgacacagagtcttgctctgtcccccatgctaaagtgcaacggtgtgatcttgggtcactgcagccttcatctcctgggttcaagtgattctccttcctcagcgtcccaagtagctaggattacaggtgtgcactattatgcccagctaatttttgtatttttagtagaaacggggttttgtcatgttggcccagctggtctcaagctcctgacctcaggtgatctgctgcttcagcctcccaaagtgttgggattacaggagtgagccactgggcctggccaagacaagatcttgttcggttgctgagactatgggtggacatcaccatgcctggctaatttggggtatgtgtgtgtgtgtgtgtgtgtgtgtgtgtgtgtgtgttagagatgtagtctcactatgttgcccaggatcatagagtgattttttttttttttgagacgagatcttactctgtcacccaggctgaagtgcaagtgatgcaatctcagctcactgcagcctccacctcccaggctcaagcaatcctcccacctcagcctcccaagtagctgagaccacaggtgcatgccaccatttttggtggaggggagcttctccatgttgcccaggctggtctcaaactcctgagctcaagcgatcctcccacatccacctcccaaagtgctgggattacaggcatgagccaccgtgcccagccaatacagggatttttttaaaccagccaccaactatagcttctaccattatgagttggcttttgtgaccattatttcatgagtccaattttgcaagtctatattttgttacaaagtattgattcttccaacaatgtttaggtaatagcacagcttaccttggcagttttgctattatcagcttcgttttgcactgattcttctcccagaaatattaattatgagttggataaaagaataatcacttataggccgggcgcagtggctcacgcctgtaatcccagcactttgggaggccgaggcaggtggatcacctgaggtcgggagttcgagaccagcctgaccaacatggagaaacaccgtctctactaaaaatacaaaattagccaggcatggtggcacatgcctataatcccagcaactagggaggctgaggcaggagaatcacttgaacctgggaggcagaggttgcagtgagccaagatcgtgccattgcactccagcctgggcaacaagagtgaaactctgtctcaaaaaaaaaaagaataatcacttatatttatctcttggccaattcatgaaaatattttgattattctcagatattccacaattgctctactatgagaatcttttttttttttttttgagacggagtctcgccctgtcacctaggctggagtgcaatggcaagatctcagctcaccgcaatctccaccttccaggttcaaacaattctgcctcagcctcccaagtagctgggattacaggtgcccgccaccacacccagctaattgttgtatttttagtagagacagcgtttcaccatgttgggaggctggtctcaaactcctgaccttgtgatccacctgcctcggcctcccaaagtgctgggattacaggcgtgagccatcgcacccagccaatacagtgatttttttaaaccaaccaccaactatagcttctaccattgtgagtttccttctgtggccacattatttcatgagtccaattttgcaagtctatattttgttacaaagtattgattcttccagcaatgtttgggtaatagcacagcttaccttggcagtttcagctattatcagcttcattttgcactgattcttctcccagaaatattctttatgagttggataaaagagtaatcacatatacttatctcttggccaattcatgaaaatattttgactattctcctcagatattccacaactgatctactgtgagaatcttttaccagactcaaacactatcaattttatgtgttttatgcacctcattggtggccctgctactcaaagaaactttccatgccttttactcccttggcttgagtccatgcggcagtttcccaaactatagtatgcactacctaggcttcatgtaggtgataaaattgttagtgtttgctattgattgttcttttagataaagatcaatcctaaaggctgggcgcggtggctcacacctgtaatcccagcactttgggaggccgaggcgggcagatcacctgaggtcagcaggtcgagaccagcctggccaacatggagaaaccctgcctctactaaaaatacaaaattagcagggcgtggtggcacatgcctgtaatcccagctactcgggaggctgaggcaggagaattgcttgaatccaggaggtggaggttgcagtgagccgagatggcgccattgcattccagcctgggcaacaagagcgaaactctgtctcaaaaaaaaaaaaagaaaagaaaagaaacaaaacaaagataaagattaattctatatggagaagaccaaggaattgctgatttctgaagcaatttaagtgcctcaaatatgagcctttaaaccaattttaaattggctgcagttttttgggtatattgctttccaacttcttgaatccatcataagatccaaatgtctggagcaagaaaggttcacatggtaaggtcaaaaggtcttccttgacccatttcttcctttatgaaatgagaatttaacactataggacggcctggtgtggtagctcatgcctgtaatcctaatgctttgggaggctgacgggggaggattgctggagaccaggaatgtgagaccagttgggcaacatagcaagaccccatctctaaaaaataaaaataaaaaattagccagccatggtggcttacgcctgtaatcctagttacttggaaggctgaggtaggaaaattgcatgaacctgggaggcagaggttgcagtgagccaagatttcactgctgcactccagcctgagtgatagagcaagactctgtctcaaaaataaataataaataaataaataagggccaggcatggtggctcacacctgtaatcctagcactttgggaggccctagcaggtggattgcttgtgcccagaagtttgaggccagcctgggcaatgtggcaaaactctgtccctacaaaaatacaaaaatcagccagacctgatggcatgtcccagtggtttaagctacctgggaggctgaggtggcaggattgcttgagcctgagaggttgcggctacagtgagctctgatcacaccactgcactacaacccaggcaacagaggggagaccttgtctccaaaagaaagaaaaaaaaaaattcaaaagccatctcaaaagtctagtcttaggttctacaacagtgatgttaattacaggagtaattggagaagtcgcaaatcttgtgatttccagaataaagatttgtaatacatctgcatcttagtcaaattttaaccccttccatcctcctaacctgtggcctttcattagttttacaaaggcagtttagttttgggaaaggctgttaccattttttaatttttcaaatctttttctttttcagggtgggtgagggggccagaccctgcctcaaagaaaaaaaaaagaaaagaaatgaaaaaatctttttcttttttatttcttttctttgtttgttttttgagatggagtctcactctgtcgcccaggctggagtgagtgcagtggtgcgatctcagctcactgcaacctccacctcctgggtttaagtgattctcctgccacagcctcccgagtagcttggattacaggcacctgccaccacgcctggctaatttttgtatttttagtagagacagggtttcaccgtgttggccaggctggtctcgaactcttgacctgagtgatacacccgcctcttcctcccaaagtgttggaattacaggcgtgagccaccatgcccggcttttcttttttccctttttttctttttgagaagaagcctcactctgtcgcccaggctggagtgcaatggcgcaatcttggctcactgcaacattcgcctcccaggttcaagtgattctcgtgcctcagcctcccgagtagctgggattacaggcatgtgccaccatgcctggcaaattttgtatttttagtagaggtggggtttcaccatgttggtcaggctggcctcgaactcctgaccttaggtgatccgcctacctctgcctcccaaagtgctggggttacaggcgtgagccaccactcttggccggcttttctttttcattaagaaacatattactgcttttttctcccccaccttttttgagatggagtcttactctgtcacccaggctggagtgaagtggcgtgatctcggctcactgcaacctctgcctcctaggtccaagcgattctcctgccttagcccctgaagtagctgggattacaggcatgcaccaccatgcccagctaattttgtattttcagtagagacggaatttcgccatgttggccgggctgattttgaacctgtgacctcaggtgatccacctgccttggccccccaaagtgctgggattacaggcatgagccaccgcccccggcccaatgaagctttaaagaaaaattaccacctttaacacaatgtaacataattgcagcctttttttgttgttgttttttgttttttgttttttgagacagagtctcgctctgtcgcccaggctggagtgcagtggtgtgatctcggctcaatgcaagctctgcctcccgggttcacgccattcttctccctcagcctcccaattgcagctctttaaggcatgtgtaatatagactctttagaaatcaaaaccttataaaactgccaggcatggtgactcacacctgtaatctcagcactttgggaggccgaggcgggtggattgcctgagctcgagagttcgagaccagcctggccaacatagcgaaaccccgtctctactaaaaatacaaaaaattagccgggcgtggtggcgggcacctgtagtcccagctacttgggaggctgaggcaggagaatcgcttgaactcgggaggcggaggttgtggtgagccaatattgtgccactgcactccagcctgggtgacagagtgaaactccatctcaaaaaaaaaaaaaaaaaaaaaaccttatgaaactaagaagccaaagttacttcagaaaacattgaactgagccattttgtttcctccctggtccatttattatgatgatgaaaaataatgttattatgattaattttttgtatctttccaaatgcctctcagtcttgtgcattcggcattaaaatggattccccaagggaattctttctactgcttaaatgtttcagcaattcactggctatcattttatcattttagtgaaaatattgatgactgtccacagaatgagctgctgtttgcagggtatatccttactgtgaacaaaagagctttaacagcgcggttaccacacaccaggctcaaaaacccagctgccaactccaggctggaagccagccaaagtgagctaggactggagtcaggaagacaggggttcttggcaatgacacccaattaattatgtgcatgatttagatgggggaagattagaggccatgcttttgctctctgttctactcctgacttgctggctcataccctacctttgttatttacttataacatgaaaacgagagtgacgactaacacttccttgcctttatctgttatatctctattttgctttcctataagcaggctttcaaggcaaggaggtcttttttattttattttattttatttatttattcatttattttttgagatagagtttcgctcttgttgcccatgctggagtgcagtggcacaatctcagctcaccacaacctccacctccagattcaagcaattctcctgcctcagcctcccgagtagctgggattacaggcatgcaccaccacacctggctaattttgtatttttagtagagacgaggtttctccatattggccaggccggtctcgaactcctgacctcaagtgatctgcctgcctcggcctcccaaagtgctgggattacaggcatgagttactgcacctggccctggcgaggactatgtcttattgatcataccagttgttatgtgcacagttgctggcacataacagtgcaaatatactcacagacagcactgaaaatttcaggaaaaagtactaggtttgtcaaccctcgatgtcaatattttatttattaatcatataacaatgctgggcttagccactggagaggttttttttaaaaatgtattgactttgggccaggagtggtggctcacgcctgtaatcccagcactttgggaggccgaggcgggcggatcacgaggtcaggagatcgagaccatcctggctaacacagtgaaaccccgtctctactaaaaatacaaaaaattagccaggcgtggtggcgggcgcctgatgtcccagctactcgggaggctgaggcaggagaatggcgtgaacctgggaggcagagcttgcagcgagccaagattgcgccactgcactccagcctgggcgacagagcgagactccgtcacaaaaaaaaaaaaaaaaatgtattgactttggaatgcataccccaacccagcacaggcccccaccatgccctgttgctcactcactctcctaatcatgcatttcatatttccagcctggcccaggattccaggctttggatttcagggtaaagaacaaactcctgattatctcaatcctgttgggtaaagggaactttatcctctttcatgaaaatagttgggcatcctggctatgtcccttgctatattttcctgctaaaagagcaaattaaatccaaacccaatgtgcatggagagaaggtggaaatcatccaaaccacttggaattaaccaatgctatcatacaatcaattaatatgactagatataaacaggctaagagatcaaaaatgaaataataaaaatattttcctaaagaaaaaggaagacagactaggtggggtggttcatgcctataataccagcactttggaaggctgaggaaggccaatcacttgagcccaggagcttgagaccagcctgggcaacatggcgaaaccccatctctactaaaaatacaaaaattagcagggtgtggtggggtgcacctgtagtcccagctactcaggaagctgaggtggaaggaacacttgagcccaggagggtaaggttgcattgaaccaaaatagcaccactgcactccagcctgtgtggcaggagggagactctgtctcaaaaaaaaatgagtaaataaaataaaaataaataaaaaagaaaagaaaaaaataccaagggaatatgaaagtaatgattagcattctaagacttttttttttttttttgaaatggggtattgctctgtcacccagtagcagggactccaggggcatgccaccatgcctggccaatttttgtatttttttgtagagatggggtttcgctatattacccaggctgatcttgaactcccgagctcaatgaatgcacctaccttggcctcccaaagtgctgggattacaggtgtgggattaccctagctggtactttttaaaatcagaataaatggtctttacttatttaatacaaacattatacctataactcatgactggaaaactgaattagggccgggtacagtggttcatgtctgtaatcccaggactttggtaggctgaggtgggcagatcacttgaggtcaggagttcaagatcggcctgggcaacatgatgaaacccggttcccactaaaaatacaaaaactagccaggcacggtggcacacacctgtaatcccagccacttgggaggctgaggcagaagaatcgcttgaaccgaggaggcagaggttgaagtcagcagagactgcaccgctgcactccagcctgggtgacagagcaagactctgtctcaaaaaaaaaaaaaaaaaaaaaaaactaaattatagtgtgtgcagtcaaccaatgcccatcagaaatgaaaactatctcctaagttactttattactcagccaggtatggaaaatagcatttgcgtgggcatggtggctcatatctgtaatcccagcagtttgcaaggctgaggtgggaggatcccttgaggccaagagtttgagatcagcctgggcaacatagtgagataccatctctgaaaaaaaaaattaatagggattaataaattctaatattagttgaggctgagccctggtggcttacacttgtaatcccagcactttgggaggccgaggcaggtggatcacttgaggtcgggagtttgagaccagcctggccaatatgattgagttgtatgttttacctcatggcatgagtaaaacatactcatcttttagtagagatggcgaaaccccatctttactaaaaatacaaaaactagccgggcgtggtggtgagtgcctgtaatcccagctactcaagaggctgagacaggagaatcgcttgaacctgggaggttaaagttgcagtgagccaagatcacgccattgcactctagcctgggcggcggagtgagactccgtctcaatcaatcaatcaatcaataatattagttgattttagagaatttgtaaccacccagtgggttcaccttgcctgctatctagatagagctgatttctcaagacaggggaattgcaatagagacagtaattaacacagagctggtacaggagactggagttttattattactcaaatcagtcttcccgagcatttggggatcagaggtttttcttttttttttgtgagagagtcttgcttgttgcccaggctggaatccagtggctcaatgctcaatctcggctcactgcaacctccgcctcccaggttgaagcaatcctcctgcctcagcctcccaactagcggggattacaggcacacaccaccagacccggctaatttttgtatttttagtagagatgggattttaccatgttggccaggctggtcttgaactcctgacctcagatgatttgcccacctcggcttcccaaagtgctgggattacaggtgtgagccactacgcctggccaggggatcagagtttttaaggacaacttagtgggtgggaggaagctggtaagccgagaatgtggatgggccatgtcagagatgaaattatagggagttgaagctgtcttcttgcactgagtcagttcctgagtggggccacaaggtcagatgaaccaggttatctttctgggtgttgccagctgatccatcaagggcagagtttgcaaaatatctcaagcactaatcttaggagcagtttagggtgggtcagcatcttgtagcctccagctgcatgactcctaaaccatgatttctaatcttgtggctaatttgttaatcctacaaaggcagtctagtccccaggcaagaaggagggtttttttgggaaaggactgttattgtctttgttttaaactataaactaagtttctcccaaagttagttcagcctatgcccaagaatgaacaaggacagcttggaagttagaagcaagatggagttggttaggtcagctcagttataattttgcaatggtggcttcaacatttttctgggtttggggagagaagttccaggcagggaattgaccacagaagggttctatagaaaaatggcctcaggtggcggggcgcggtggctcacgcctgtaatcccaactctttaggaggccaaggcgggtgggtcacctgaggtcagcagttcgagaccagcctggccaacatggtgaaaccccatctctactaaaaatacaaaaagtagccgggcgtggtggcaggcacctgtaatcccagctactcaggaggctgaggcaggagaatcacttgaacctgagaggccgaggttgcagtgagccgagatcgtgccattgcactccagcctgggggacaagagtgagacttcatctcaaaaaaaaaaagaaaagaaaaacagcctcaggttgggtgcagtggcttatgcctgtaatcccagcactttgggaggccaaggtgggaggatcacttaaacccaggagttcaagaccagcctgggcaatatggcgagaccctgtctctacaaaaactaaaaaatttagccaagtgtagtggcctgtgcctgtggtctcagcttcttgggaggctgaggtgggaggattgcttgggcctgaaaaggccatagtgagccacgatcacgtcaccatactccaagacactgagacagtatgaccctgtctcaaaaaaaaaaaaaaaaaaaaaaaggaaaataaaagaaaatggtatcactgtctaataaagtatcaaaacatcattaaaatcagtgattatgtccttaggtcccagatcaaactccagagaagccattttcaaatcaccaattcatgattcaaattatagaattataaccaaagtgaggacccatagtataaggcaaacagccaaaattctttccctagaagatcaaaacatcttttgaaaatttttaaggaactcagagctctaagattcccgtgttacccaaaaatctctttttgtcttcaaaataatgctgatctgtagtatgccagtgatagggacaggagtcagagaaattgtaggcagaaaagggcagagtccctggtaaagccctaccctcaagcctggaaccttcgcccaaaatgagaacatgcattcctgttttcccacttgaaagttgccttttccaaaaccacccatgacccaccctgccactcatcctgtacccatggaaacccctgacctgactggcagagggcagagaaggggagaagagaagcagctggacatcagagagtgcagtttgatgtcagagagaagcagcttgacttcagagggatggcttgacaaccttgcttccgtccccagctggactccaggggaagatcaccttcccactccatcccccttctggctccccttcctgctgagagccactttcatcagcaataaaatcctctgtattcaccactcttcagttcatttgtgtgacctgatttttcctggatgctaatcaagagctcgagtgccacgggtgcggatgctaaaggctgtcacactgaccttctgccctcgctggcagagagcaaccacctcacgaaaaaagagagggcccactgagctgtttaacatagatggcaaagctaaaagagcactataacacacaccctctggggccttgggggtcgtgggtactccccgctagacactgccaggggcccacatggaattttgctcctgttgtcacccaaaagcactcactctggcacctgcacctgctcacctgcatcctcccccttctgtgaggggttgagagctgtgagctgagtaagcgaggcatccctgtcatgaggcccatgatgggatcaaggaaaatttcctgtttcaccaggttcagccaaaccaagatgcccacatctctttatatagtatgcagttttcttttcatctctgttttttttttatgatgtctcttttcatctctctttttaaatactattggtgcatgttctctgtgttctgtataccaaagtcatatcataaactatattatgaatctatagtttcagaaggcttccctttgcttgcttcaagtaattctctaccttttggcctcagtgcaatatgaggaagaggaggaggcagatgtgatgaacacgaagccctgttgcacctctgcagaagaggccccacagtcattttcaacacaaggctccaaggagaacccactagcacagtaggctggaaagaaacatatttgctcccctgtctagctgtgaatgtgttcaactcagttctgtcttcctgtctctcttacaacactcatgagaaatatcgtttacagacaccactgtgtacccatgggtgtctcatccaactgttattaaatgccctggggccttggctgcatctcctttcttggtactcccaccccagacagaatatcataacatccatgagtggcaatgacattattattcctgctctaatttattttttaaaataatttgcatgcatcagtatacaacccaatctcgcttacttgcttgcttttcttttctttttcttttttctttttttgagtcattcttgctctgtcgcccaggctagagtacagtggtgccatctggctcactgcagcctcctctgcccgggttcaagcaattctcgtgccttggccaccaaagtagctgggactacacatatgcaccacaactcctgcctaacttttgtattttttctagtagagatgtggtttcgccatgttggtcaggctggtcttgaactcctgacctgaagtgatctgcccggcttggcctcccaaagtgctgggattacaggcctgagctaccctgccctgcctctaaacttttattataatccaaacagaattgcattcaacaattgctcaaggccgggtgtggtggctcacacctgtaattccaacactctgggagcctgaggtggaaggattgcctgaggccaggagttcaagactagcctggacaaaatagagagactccatgtgtcccaaaaaaaaaaaaaaaaaaaaaataggcctataatctcagcactttgggatgccaaggtgggtggatcacctgaggtcaggagttcaagaccagcctggccaacatggcgaaatcccgtcactactaaaattacaaaagtagctgggtatggtggtgcatgcctgtagtcccagctactggggaggctgaggcaggagaatcacttgaacccagaagggggaggtttcagggagccaaggtcatgccactgcactccagcctgggtgacaaagcaaggctccctccgtctcaaaaaaaaaaaaaaaaaaaaaaaagccaggcgtgatggtacatgctatagtcccagctactcaggaggcttaggcaaaaggatggcataagctgaggagtctgaggctgcagtgagctgtgataatgccactgcactccagcctgggtgacagagcaagaccctgactctaaaaaagaaagaaaaaaaaaattgctcaaatgcttcatcattgaaaaaagcatttcatatgttgggactgcctttcataagtcataattaagccagaactgaattctccatcaagactgttggcagttaatggcattttaaattttcttcttttggtatattggcattttctaattttctatcatgaacacttgttaccatttcaagtagagaataactgcatactaggcaatgtgctaagaattttacatgcattatcttactaactgctcccaaccatctttgttttttttgttttgttttgtttttgttgttgtttttttttttttttttgagatggagtcttgttttgtcgcccaggctggagtgcagtgtcacaatctcagctcactgcaacctctgcctccagggttcaagtgattctcctgcctcagtctcccgagtagctgggattacaggccccagccaccacacctggctaatttttgtatctttagtagagacgggatttcaccatgttggccaggctggtctcaaactcctgacctcaagtgatccacccgcctcggcctcccaaagtgctgggattacaggcgtgagccaccacgcctggcccatctttgaaatactattgttagtacattttacagcaaaggaaacaaaagccataaaggttaaataacgtacctagttcagcttggctgtgcggctttatacaaaccactaattctcttaggcccttagttttatggcctataaaactgagatagtatctccctcattaaatgtaaggattaaaaaagaatgccaactgtgaaggagttcttatgtgagatacctggcctacggaaaacaatactcttcctttatgttctctgcagatgtcgagtactactattaaaacagactccttagcaatacagttcggaagatagctcaaatgcttggtacacgtatctcctctcaacttcaagttcactgtcctcagcctggggacttgaaattggccatcatgggaatcagaagccagcagaaaacaccattcatcagggctatcctccttggagagccggttgttcgatatttacctgcatgtacaattcctaaattgaaagatgattgatgaacttactaatgtggctctaattcaggcttcatttatttatttaggtagaatgcttcagaactgggctctgcatgtcatgagggctatcttcccaactgtaacatgaaggaattccaagaatggcaaaaaaaaaaaaaaaaaaagtctcccaaagatttttcccatttcagctgtttcaatctgattagggaaacacaatacactatacataacatctttgagtgttgatgtgagtttttttttcttttttttttttggatctctatgctgcctgttgcttccataaaaggccccgattaatgatatttatgaatagcccaatttggtttttttttgaggcagagtctcgctctgtcacccaggctggagtgcagtggcgcgatctgagctcactgcaacctttgcctcctgggttcaagcaattctcctgcctcagcctcccatgtagctgggattacaggcaattgccacgcctggctaattttagtagagatggggattcaccatgttggacaggctggtctcaaactcctgaccttaagtgatccgccagccttggcctcccaaagtgctgagattacaggtgtaagccaccactctcagccatgatagcccaatttgtttggcatacctgcatcttggagtaactattttactaaccagacagtgtttcttctcctaagggaccatatcttgtacaaatgcttggcatagagaaattatgatactttattaaggccaggtgaagtggcttatgcctgtaatgccagcactttgggtagccaaggagggcagatcattggagcccaggagtgtgagaccagcctgtggaacatggtgaaaccctgtctctaccaacaatttaaaaacaaaaaaattaaccaggtatgctggtgcgtgcctgtaatcccagctactcgggaggctgaggtgggaggatcactggagcccaggatataaccactcaacaggttcaccttgccagctgcctagacagagccaatttatcaagacaggagaattgcaacagagaaagagtaattcacacagagctggccactgttgtattattcaaatgagtctctctgagcatttggggatcagtttttaaacataatttggcccaggtgtggtggcgtacacctataattccagcactttgggaggctgaggtgggcagattccttgaggtcaggagttctacaccagcatgaacaagatggtgaaaccccatctctacatttcaacaacatggtgaaaccccatctctataaaatacaaaaaattagctgggtatggtggagtacacctgtagtcccagctagccactgcacctggccaacccactgatttagagtgaaataaatttatactatcacagttctgaaggtcagaggtccaaaatcaaggtgacagcagaaccatgatctctctgaaggctgtaggggagaatctattccatgcctttctctgagctcctggtgctcccagcaatgcttggcacttattggcttgtagaggcatcacttgaatctctgcctgtgttgttgcacagtgttctcctgtgtatctcgcttcctgttgtcttccctgtgtgtctctgtgtttcttctccttttcttagaaaaggagaccaattagggctcaccctaattactttatcttttttatttattcatttatttttgagacagagtcttgctctgacacccatgctggagtgcagtggcaccatctcagctcgctgcaacctctgcctcctgggttcaagcaagtctcccacctcagcctcctgagtagctgggattacaggtgcctgccaccatgcccagctaatttttgtatttttttgtgggggggggggggcggggacagatgtttgctcttgttgaccaggctggagtgcaatggcgcaatctcagctgaccacaacctctgcctcccaggttcaagcaattctcctgccttagcctcccgagtagctgggattacaggcgtgcaccaccatgcccggctagttttgtattttcagtagagacgggatttctccatattggtcaggctggtctcgaactccccacctcaggtgatctgcctgccttggcctcccaaagtgctgggattacaggtgtgagccaccacgcctggcctaatttttgtattttcagtagagacggagtttcaccatttaggccagactggtctcaaatgcctgacctcaagtgatctacctgcctcagcctcccaaagtgctgggattacaggcgtgagccaccacacctggcctaatgacttaatcttaatttgattacatctgcaaagaccctctttcccaataaggttgcattcacagatatgggggttgggacttgaacatgtgtttttgaggaacatgagtcaacccataatagatactgagaaggttgttctcagaaaatgctagatatttggcgcaggaggttgtaactaatcaggccaagttcaagaggatcaatcaagggacagaggggcagaacagatgtgtagagggaagcagagagagaacatcccagaaagttgaagactgtggtctccacgacatcccttgtgtcaactcaccattccattctttatttttattcacctgagtaactttttcttctctcttttttttttttttttttttgacagagggtcttgttttatcacccaggctggagtgcagtggtgtgatcatggctcactgcagccttgaccttctgggctcaagcaatcttctggtctcagccccccaagtagcagagactacaggcttttgtcagagatggagttttgccacgttactcaggctggtctggaactcctgagctcaagcaatcctcccacctctgcctcccaatgtgctgggattacaggcgtgagcccagcctggctttctctttctatactctaaaatcattagaaccctgagcagaagagtaattttcccaaagtcagtgtggaacgggtcatgatttctgaaaacaagctcaccagccagaagaaaactgataaatacaaaggaaacgtgataggttcttcctaaagcaaaatttggccgggcgcagtggctcacacctgtaatcccagcactttgggaggatgaggtggatggatcacgaggtcaggagttcaagaccagcctggccaagatggtgaaacttcatctctactaaaaatacaaaaaattagctgggtgtggtggcacacacctgtaatcccagctattcaggaggccgaagcagagaattccttaaaccccgaaggcggaggttgcagtgagccgagatcgcgccactgccctccagcctgggtgacagagcaagattctgtctcaaaaaaaaaaaaaaaatgcaaaatttatcccataaaaaggtatccttctataaatgtcttttgtttctacttttttttttcttttttttttagacaggtctcactctcgttgcccaggttggagtgcaatggtgtgatcctcccacttcagcctcctgagtagttgggaccacaagtgaaagctactacacccagttaggttttgttgttgttgtatttttagtagagacggggtttcgccatgttgcccaggctggtctcaaactcctagactcaagcaatcctcccaacttggcctcccaaaatgcagggattacaggtgtgagccactgtgcccagacagtttctactttttatggatcaaaatatccattaaaatggaagtgacggcagggtgcgctggctcacacgtgtaatcttagcactttgggaggctgaggggggcggatcgcctgaggtcaggagtctgagaccagcctgaccgacatggagaaactccatctctaccaataatacaaaaattagccaggcgtggtggtccatgcatgtaatcccagctactcgggaggctgaggtaggagaatcgcttgaacctgggaggcggaggttgcagtaaaccgagatcttgccattgcactctagcctgggcaacaagagtgaaactgcgtctcaaaaacaaaaacaaaaaatcccggaagtgacaggagtgtgttttgttttacagtgttccctgtggcaaaattaaaactggcaatcctatgtctagacctagaatttttaaaaatttactttcttggatcgaaaatgatctaaagcaggctgaaaccagtgttctgcctgcagaacacctgcaaactttgctgagtaggagatctctcctggatcccacctctgcttcttttcccccagatatctcctgtcatatttgttttttaccaggctgagtgttcctaaaggcttcccttgcattgactatggagctcacagcaatttttttgttgcttggaaatggctactcctctgtaagggtgtgtttcaggaaaaactctcccaaactgtgcttttccactgtgctcacaccaccacaacgatcgtcaacacagaagaacacttctgtggccaaatatgtgggagtttttccccatacaccaagcagccgacaccaggtgggggccctacaatttcattctgacattatctacttggagatagcatcagatcccatgggttgaggtctcagtccccaacactgcctcccttgcagaagacatcagttgcaagtctctgccactggaatttcggacctaccaacaacaagttgaagtctccacgacccccaatttgggttcctttaatttgctagagaggctcacaggacccagggaaacagcgatgtttaccagtttattattataaaggatacagatgaagggatgcacagatatgaagaaaggggtgcggagcttccatgccctccctgggtgcaccaccctctagaaatctccacacgttcagccatcccgaagctctccaaaccaatcctctgtgtttctatgaaagcttcatggcctcagcattccttctgtcagaggcatttgaaccagagcaactccatcttgaatatgagctgggtaaaaaaggctgacacctactgggctgcattcccagatggttaggcattctaagtcacgggatgagatgggagatcagcacaagatacaggtcataaagacctttctgataaaacagtttgtcgtaaagaagccagcttaaactcaccaaaaccaagatggcaatgagagtgacctctggtcatcctcactgctacactcccatcagtgccacgacagtttacaaatgccatggcaacatcaggaagtaaccctatatggcctaagaaggggaggaatgaagaaccacattcatgcttttgtttagcatatattcatatacatgtttagcatatatgcttttgtttagcatatattcaagaaataaccataaaaatgggcaaccagggctgggcgcggtggatcgtgcctgtgatcccagcactttgggaggccgaggcgggtggatcacgaggtcagcagaggtggagcttgcagtgagccaagattgcagcactgcactccagcctgggcaacagagccagactctgtctctaaaaaaaaaaaaaaaaaaaaaaaaaaaaaaaaaaaaagggcaactagccaggcgtggtggctcatgcctgtaattccagcactttgggaggccaaggcaagtggatcacctgaggtcaggagttcgagaccagcctgatcaatatggagaaacccgtctctactaaaaatacagaattagctgggtgtggtggcacatgcctgtaatcccagctactcgggaggctgaggcaggagaattgcttgaaaccgcgaggcggaggttgcggtaagccgagatcacgccattgcactctagcctgggcaacaagagcaaaactccacctcagaaaaggcaaccagcagaccagcagaccttggggctgctctgcctatggagtagccattctttcgttcctgctttcactttattctgtggacttgcttcaaattctttcttgcccgagatcaaccccctcttggggtctggatccggaccctttaccagtaacactcgagtgtatagggcaggactgaccctggggagggtcctaaggcccactgcacccggcctccatgggttttaaaagcttccagcactctaggctgggcacagtggcgagcacctgtagtctcagctattccggaggcggaggcacaagaatggctgaacccaggaggcggaggttgcagtgagtcgagatagcagcactacattccagcctgggccacatagcaagactcatctcaagaaaaaaacaaacaaaaaaaaaaacaaaaaaaaaccctccagcattctaagaaaaatgttaacaataaagataatgtggggctttactttgggaggctgagttgagaggattacttgaaatcaggaattcaagaccagctgggcaacaaaatgaaaccccatgtcaacaacaacaatcaaaaatcaaaaaattagccaggcctgatggcacatgcctgtggtcccagctacatgggaggttgaggcaggagaattgctggagcctgggagatcgagactgcactgagccgtgatagtgccactgtgctccagcctgggtgacagagcaagactctgtcttaaacaaacaaatgaagaagatgtggatgttcctgcaggggccaaggccctcggccccctggagatttgaaaaccactgacaggcagattaattggagaaaggcatacaaatttatttgacatgtatacacgggagccttcagaatgaaaactcaaagatacaggaaaaaatgtcgatttttatgcttgggttcaacaaagtatggacagccaggtaactggaaaaaaagggcaagatctaatgttaatagactgaatgaggagcccagcaaggcctgtctgtctagattcctggcctctccgagtagcactacttccttctgggtgtggggcaagaccctctctggaataggggtcttatggcctacagtcaaacaaggtaggccagataattagaattttttcttttctttctttctttttttttttttttttttttttgagataggatctctctctgtctctctgccatgtctggtaactttttttttttttttttttttgagacagagtcttgctctgtcaccaggctggagtgcagtggcacgatcttggctcactgcaacctctgccccccaggttcaagccattcttctgcttcagcctcccaagtagctaggcttacaggtgcccatcaccacgcccagctaatttttgtatttttagtagagacggggtttcatcttgttggccaggatggtctcgatctcctgacctcatgatccgcctgcctcggccttccaaattgctgggattacaggcatgagccaccgtgcctggccaacatgtctggcaactttttaaattgtgttcactgcaacttccatcttctgagttcaagcaattttcttgcttcagccttctaagtatctaggactacaggtgtgcatcaccatgcctggctaatttttatattttagtgaagacagagtttcgccatgttggccaggctagtctcgaactcctgacttcaagtgatctgcttgccttggcctcccaaagtgctgtgattacaggcttgagccactgtgcctggccaacttttaaaatttttttgcagagatgatgtttcactatgttgcccaggctggtctcaaactcctggcttcaaacaatcctcccacctcagcctcccaaagtgggattacaggcttgagccaccacacttggccccaattttattaaatgcccatttatcatgcctagggtgtttgatgtcacttcatgtgccatggtaaaatgaaaatcttgcataagcactactgtttattacctctcctcctgaacctgagaagctgagctggaggaggtcatacagccagacaaatggttccgttacaaaacaaggattcctagtgtttccctgattaattccttctttcattgttctgattatttttgctacagaacaaatcactccaaaacttagcagcttaaaaccaccattttattatctttttcagttctataggctgactgggctcagcaggaaggttcttgttcaggatttctatgcagttggagtaagatggcagctggggctggagtgggcctaaaagctgaaccagatttccagaatggctcctcctcttcctcctcctcctcctcctcctccttcttcctctattactattattattgagacagggtctcactgtcaccaaggctggagtgcagtggctcaatcatagctcattgtagcatcaaactcctgggctcaaatgttcctcccacctcagcctcctgagtagttgggactatagtcatgtgctaccacggccagctaattttcaaatttttcatagagatgtgtgtggtgggggagcagttctcactatgttgcaggctagtcttgaactcctggcctcactcaatcctgccttggcctcccaaagtgctgggtttacaggtgtgagccaccatgtccgtccaaagatggcatctttttttttttattgatcattcttgggtgtttctcgcagagagggatttggcagggtcataggacaacagtggaggggaggtcagcagataaacaagtgaacaaaggtctctggttttcctaggcagaggaccctgcggccttccgcagtgtttgtgtccctgggtacttgagattagggagtggtgatgactcttaacgagcctgctgccttcaagcatctgtttaacaaagcacatcttgcaccgcccttaatccatttaaccctgagtggacacagcacatgtttcagagagcaccaggttgggggtaaggtcatagatcaacggcatcccaaggcagaaggatttttcttagtacagaacaaaatggagtctcctatgtctacttctttctacagagacacagcaaccaactgatttctctatcttttccccacatttcccccttttctattcgacaaaaccgccatcgtcatcatggcccgttctcaatgagctgttgggtacacctcccagacggggtggcagccgggcagaggggctcctcacttcccagaaggggaggccgggtggaggcgcccccccacctcccggacggggcggctggccggggggcggctgccccccacctccctcccggacggggtggctggcggggcgggggctgtctcccgcctccctgatggggcggctgccaggcggagatgctcctcacttcccagacggggcggctgccgggtggaggggctcctcacttctcagacggggcggccgggcagagacgctcctcacctcccagacggggtcgcggccgggcagaggcgctcctcacatcccagacggggtggcggggcagaggcgctccccacatctcagacgatggcggccaggcagagacgctcctcacttcccagacggggtggcggccgggcagaggctgcaatctcggcactttgggaggccaaggcaggcggctgggaggtggaggttgtagcgagccgagatcacgctactgcactccagcctgggcaccattgagcactgagtgaacgagactccgtctgcaatcccggcacctcgggaggccgaggctggcggatcactcgcggtcaggagctggagaccagcccggccaacacagggaaaccctgtctccaccaaaacaatacgaaaaccagtcaggcgtggcggcgcgcgcctgcaatcgcaggcactcggcaggctgaggcaggagaatcaggcagggaggttgcagtgagcagagatggcggcagtacagtccaccttcggctcggcatcagagggagaccgtggaaagagagggaaagggagaccatggggagagggagagggagaccgtggggagagggagagggagaccgtggggagagggagctgcaggtttctttatcggtattgatcagatggcgtctttacttacacgcctggtagctaattggagtggctgaaacagctgaggctggttttctcttttcaagtacttttccacatggctaaattgggcttccttacaacatggtgggttaaagagaatcacacatctcacatggtaactggcttccctagggggttatttttaatctaccatgataatgtaatcaataaaagattttttaagtgtagggaggtaagaagccctgatgaatacaggctgggcagtgtttgatctgaaggcaagttctcaggacctactcaactatatgttagctccttttgcttttttgagacttagtcttgatctgtcatccaggctggagtgcagtagtgtgatttcgacttactgcaacctctgcctgctgggttcaagtgattctcctgcctcagcctcccaagtagctagggttacaggtgcccaccaaccaagcctggctaatttttgtatttttagtagagacggggtttcaccatgttggccaggctggtcttgaacccctgacctcaagtgatctgtctgcctcaacctcccaaagtgctgggattataggcgtgagccaccatggccggcctttttttttttttttcttcagacagagtctcactctgttgcccaggctggagtgcagtggtgcaatttggctcactgcaacttccacctcctggttcaagcaattctcctgccttggcctcctgagtagctgggactacaggtgcccaccaccacaccctgctgatttttgtatttttagtagagacagggttttgtcatgttggccaggctggtcttgaactcctgacgtcaggtgatccaccctcctcaggctgccaaagtgctgggattacaggcgtgagccactgcacccggccccttctgctctttcctgcatctcaaaacatgcatatgcacagaaaaactgtctcctctccttaccccctgccttggatccttcaccccatgttttctgttttctaaaattcctcaattacatacctgaatttaaaacaatcctctttaatatatgtgaacctttccttcccggaggtcatgaagctgttcccagtcatttaatcccagcgatgtattatttatctattgccatataacaattcaccccaaacttagtggcttgaaacaataaacattttatattgcagtttctgtgggtcagaagactagaagcagtttagctgagtggttctggtttggggtttcttgggaggctgcagacaagatgtcagctggggttgtagttatctgaaggcttgcctggggctggcagatttacttccaagagggcttgctcacatagtgctggttattagccggaaccttcagagcctccctatgagggactgctttactgttctcatgatatgatggcagccttcctcagagtaagcaatccaagagagaacaaggatcaggctgcaatgtttttgtgtgagctagcctcagaagccatcctctgtcatttctgtaatatcccattggtcacataggtcagtcctattcaatgagaaagggtatgaacaccaggaggtggtgggagactgggccaagggaaagctaatattgaggggagaaaagaagagacaggctaagcgtggtggctcatgcctgtaatcccagcactttgggaggctgaggcaaaagagtcacttcagtctaggagttcgagaccagcctgggcaacatggtaacaacccatctctacagaaaattttaaaaattaattttaaaaaggtgaggaggctgggtgcggtggctcacgcctgtaatcccagcactttgggaggccaaggcaggcagatcacgggagctcaagaattcaagaccagcctggccaacatggtgaaacccagtctctactaaaaatataaaaattagccaggagtggtagtgtgcacccataatcctagctactcaggaggctgaggcagaagaatcgcttgaacctgggaggcggaggttgcagtgcgctgactgtgctccagcctgggcaactgagcgagactccatctaaaaaaaaaaagaggaaacaaaggaggtatgtaatattggagccaggatcattttaaggaaaactcaagcactaatttgagtcccagagctgggaatagagatgaagttcttgagacctggttgtccttgacacgtgttgcagaagaggagggaaaacagaagtgagaatgacagacccatttttcctctttcaatgttatttttgcactaacagaaggagacaagctgcccttgcccttaaaaggtcattttcaatctcttggccagactagaaggagaatatttctcctgaataattaattggttttaagaagatggaaagatatttttagcttctaagaagaaatcagggtcgcttgaatgatatctttattcaacaaggacacagtctttcaggaagtttacttgtgccaatgtaattagtagttgctttacaggacaatgctgtgcaggtttcacgctgtgatgaaaggagatgattttccagttactgttaattgaaaattgaagcaaagtgaactttgcaatcaaaacaggaagggaaaaccagactgcaataagacaataaccttagagctttgttctttcacaacacacagagaagaagcaaagggttttttaaactactttcatctgggccaaatttcttggaagaatgccctctgcctgccatctacttccctctggcttggcttttgccccaaccaccacttcactgaacctgctttcattatggccaacaaggactccatgttgcctaacccactggacatttttctgttttgtgttttctgatctctaagcaacattgactcaattgaccactcactgtttctgaaaatactttccttctagtttcagggatgccattttctccttgtttgtcatctccctggccatctatttaaggtcttcctccattatccaacctctaaatgttaaggatcctggtcaggcacagtggctcatgcatgtaatctcagaactttgggaggttgaggtgggaaaatcacttgaagacaggagttcaagaccagactggccagtatagtgagacccccatctcaacttttatttatttatttatttttttgagagggagtttcactctgtcacccaggctagagtgcagtggcatgatctcagctcactgcaacctccgcctcccggtttcaagagattctcctgcctcagcctcctgagcagctgggattacaggtgcctgccaccgtggctggctaatttttgcattttaataaagacgaagtttcaccatgttgactagcctggtctccaacccctgacctcaagtgatctgtctgccttagcctcccaaagtgctgggattacaggtgtgaaccaccgcgcatggctcccatctctactttttaataaaaagagaataataataataaagctgagaatcttaatcattgcgtgtcttctctttttcttttctttttttttgaggtggagtcaggctggagtgcaatggcagggtctcggctcactgcaacctccgcactatcctgcctcccaagtagctgggattacaggcatgtgccactactccccgctagttttggtatttttagtagagatggggtttcaccacattggccaggctggtctcggaatcctgacttcaggtgatccactcgccttggtctcccaaaatactgggattacaggcgtgagccgccacacccagccacatctctgctctttctgtgctttctgtcatataagtactgcactttaagcaattgcactactggagctcctctgttctctttctgaatgattttatccaatcccatggctttaatgccatcttgataccagcattatcaacatttatatctccagccctgatctcttcctggaacttcagactgttataattcacctgccttcttaatattccaaccaggaaattcatagacagcacaatgtatcgccttggttcctcccttcccaaacctgttctcccacagtaggccttacttgtcttgtaggtagcaccacctcctatttaaccacactagtaggaaatttcattatatctggattcattttttctccccactctctacatccaattcatcacaagtcttgttcattctgtatccaaagccatttcaaacttgtccacctccattaccaccccacctccttaccctctccattaccaccccatctccttgccctatccaacccattctctacccagaaaataggtctatcttaaaaaataaaaatcagatcactcacagtctatgcaacatccttcattggattcccactacacttagaactaaatataaacttaggcctggcacagtggcttacacctgtaatcccagcactctgggaggccaaggcaggccaatcacctgaggtcaggagttggagaccagcctggccaacatggcgaaacctgtctctactaaaaatacaaaaattagccaggcatagtggcaggcacctgtaatcccagctacttgggaggctgaggcaggagaatcacttgaacccaggaggcagaggttggggtgagttgagatcgcgccactgcactccagcctggatgacagagcaagactccatctcaaaataaataaataaataaaaataaacttgtagtgtcctctaaactgctacaggacctggcttctacccatcctcccaagtgcaagctcatttcatgccactctgtctttggcacacaatgccagtcctgtccagcctagaggtctttgctatactgttccttcatcctagaagctcttcccctactcttcccatgctagctttgtctcttcctctgggccttagcttaattattgtccactaaagcagactttctgaccatcctatctgaagtaagcttctttgtttcctttattctctttttagctccttcttcccctcagtcctcacagttattcccacagtcataatgccaacccaatttttccacaaatgaggaaacagaaagactttttaggaacttgttagattttagacaaatcaaacaccacataaacaacaaactgcttctctcctaactgggcatcctgctggatatgaccagtcatacccaattccacccatatctaaaaattgaaaggctaactgagcatgggggtacacacctatagtcccagctacttgggaggctgaggtgggaggatcacttgaacctgggaagttgaggctgcagtgagccaagattgtgccactgcactccagcctgtgtgacagagtgagactctgtctcaaaaaaacccaactagtttttaaaaagtaaatactgataaggtgaatcggcatctcaaacccaaaatgaggatactcttgagacccccttcagtggaaagtgtgtaatgacccagatcctgttttgctgcaatcttggccctacatgacacagcggcattcaaccgaacacgtaaagacgagaataactttctcacgagtctcatttcctgtgttttatattagagctcattgttgttctctttttattcctcctctaagaccaaagtcccatgagatggaccttggtagagtgaaaaagggtttgaactcaactcaaatgctatatgagtgcatgcatgaaactccagaatgggctccagcactttcaaattttttttcattgacactatccacatgtagaaaacataccctgtaaagtacaacttctcccttttgtttctaaggtgaaaacttaggtcatatgcacggagctgacaacagatcacccaataattatgtgattgaagttgtcacttatttgggtaaaacctactcaggaatttgaattctcttctaacaacttgaacagcttctcttctgttttgttaataaatcactaagtatggcatacaaatcaccagcaagttttcggagaattaaacttactgaagctcctgctttccagcatttttattttattttattttattttttgagacgaagtctcgctctgtcgcgcaggctggagttcagtggcacaatctcggctcactgcaacctctgcctcccaggttcaagcaagtctcctgactcagcctccctagtagctgggattacaggcacgtgccactatgcccagctaatttttttttttttttttttgaaacggagtttcgctcttgttgcccaggctggagtgcaatggcatgatctcagctcactgcaacctccacttcttgggttcaagcgattctcctgcttagcctcccgagtagctgggaggctgaggcaggagaatcgcttgagcccgggatgaggaggttgcagtgagccgacatggcgccactgcactccagccccagcctgggcaacaagagtgaaactccatctcaaaaaaaaaaaaaaagaaaaagaaaaagaaagtgagtcacttgataccacaaagaatataggctcctttgtgagctaaaatttctagatctataactcaacaaaggtgatttatgacttttataaatgttggaggccgggcacagtgcctgacacttgtaatccagcaagttgggaaggcaaggtgggcagattgcttgagcccagaagtttgagatcagcctgggcaacatgatgaaaccccatctctacaaaaatagaaaaattagccaggtgtggtggcatgcacctgtagtcccagctactcaagacgcagaggtggggggatcacctaagcccaggaagtcgagcgaaccgtgattatgcaactgcactccagactgggtgacagactgagaccctgtctcaaaaaaataataaagttaaattaaaaattaagtgcagctgggtgcgacggcacacacctgtaatcccagcatgtccagaggctgatgtgggtggatcacaaggtcaggagttcaagaccagcctggccaagatggtgaaaccccatctctactaaaaatacaaaaattagctgggcatggtggtgggcacctgtagtcccagccactcgggaggctgaggcacgagaatggcgtgaacccgggaggtggagcttgtagtgagcagagatcatgccactgcactccagcctgggcgacagagcgagactccatctcaaaaaaaaagaaaagtgagtcactagataccataaagggcaaaattcccaggctcatctgtccctgaggaaacgttgaggaggaaatgtggttagttgtttgtttatatttgtttctataaggaagaaagcttgaggtagagctgaaatgcttttgcattttctcatgccactttaatacagtctctattcaggactcagtgaaaacttttaaaagaatatcaagagaaatatttttgttgctgtcgttgttttaaccataagaatcatgactgggctaagagatttccctaaactgtccaagcatgctgtagctgctaaggccattttcttggctgcttctatttttcttttttttatgacctatattgcctccagattggctgcttctaaaggggttgttcgtactgggctctgaactgagttacccagtttaacttctatgtagaaaattacaccagctctggccaggtgcagtggctcatgctgtaatcccagcactttgggagaccaaggcgggtggatcacctgaggtcaagagtttgagaccatcctggccaacatggtgaaaccccgtctctactaaaaatacaaaaaattagccgggtgtggtggcgggtgcctgtagtcccagctacttgggaggctgaggcaggagaattgcttgaacccggccgggatgaggagatttcagtgtgccgacatggcgccactgcactccagcctgggcaacaagagcgaaactccatctcaaaaaaaaaaaaagaaaaaaaacgacatcagctctatctcgaattcagtgtctggtgaaattctgaaagaacttaagaaatgctatgagacaggagacacaagacgcaactctgtcttcattgctcaacaaatgctaacagggtgtgtgcttctgttctcaatgagtcagacagattggccagctctgagctctgtttaatttggtcccacaggcatgggcctccttcaaacactgtcacttccagaaagtaaagcaagacacaaaacaaaacaaaatatctcagagctggaagagacctgagggatcacctcctccaacattctcacttaaaaaagaaaaaaatctaggctggatgcagtggctcatgtctgtaatcccagcactttgggaggccgaggtgggcagatgacttgaggccaggagtttgaggccagcctggccaacatggtgaaagcccatctcaaccaaaaatataaaaagtagccgggtgtggtggcgtgcgcctgtaattccaggtactcgggaggctgaggcacgataactgcttgaacccaggaggcagaagttgcagcgagctgagatggcacctctgcactccaacctgggcaacaaagtaagttcttgtctaaaaacaaaaacaaacaaaaacctatcacttctattattactattattattattattattattattattattattattttctttgagatggagtcttgttctgtcacccaagctggagtgcagtggtgctatctcagctcactgtaacctccacctcccgggttcgagcaattttcctacctcagcctcccaagcagctgggactacaggcacgcaccaccacgcccagctaatttttgtatttttagtagagacagggtttcaccatattggccaggctggtctggaactcctgaccttgtgatccacccacctcaacctcccaaaatgctgggattacaggcatgagccactgtacccagccaaaaacctatgacttctaattcaacttttttgttgttgttgttttcgagacagggtctcgctctgttgcccaggctggaatgcagtggtgccatctaggttcactgaagccttgacagcccgggttcaagtgattctcctgcctcagcctcccaagtagctgggattataggcctgcaccaccacatctggctattttttttattttttgcagagacaggatttcaccatgtttctcaggctggtcttgaacaggcctgggacactgtacctggcctgaaatttttgttttaaaaaatcattgaccaatttttttgttttggagttttgataaaacagagtagaattttcctacgttcttttttttttttttttttgagacaaagtttcactgttgttgctcaggctggagcacaatggtgtgatcttggctcattgcaacctccgcctcccgggttcaagcgagtctcctgcctcagcttcctgagtagctgggattacaggtgcccgccaccacgcccagctaatttttgtatatttagtagagacggggtttcaccatgttgaccaggctggtcttgaacttctggcctcaggtgatccacccttctcggactcccagtgtgctgggattacaggcatgagccaccgcacccggctcctacattcttaatgaatgactgtattagaaaatgaggccgtggtggctcacgcgtgggcctgtaatcccagcactttgggacgccgaggcaggtggatcacgaggtcaggagttcagaccagcctgaccaacatggtaaaaacccatctctactaaaaatacaaaaattagcctgacatggtggcttgtgcctataatcccagctacttgggaggctgagacaggagaatcgcttgaatctgggaggcggaggttgcagtgagctgagatcacgccactgcactccagcctgggtgacagagcgagactctgtctcaaaaagaaaagaaaagaaaaggaacaacaactgtatattttagggagaaaaactgaaagaaagaaattaggccaggcatggaggctcacgtctgtaatcctgacactttgggagactaaggcaggaagattgcttaagtccaggggttggagaccagcctgcgcaacatagtgagaccttgtctctgcaagaaaaaaataagataaaattagcctggcatggtggctacttaggaggcagaggtgtgaggattgcttgagcctgggaggttgaggttgcagtgaactgagaacacgccactgcacactagcctgggtgacagagcgagaccctgtctcaaaaaaaaaaaaaaaaaagaaaagaaaaagaaataaaaagaaagagagaaaagaaaaaaggaataaagaaattagtttttccactctgaagtatatttgactcacaccacaacccaggaagaaacccaagggtgcttttgtagcaactgtttatcaatagaaaaacatttagtaaaactcaactcttactgctgtgacatgtatgtagattctacttccttattctcttgaaaaggtgacactgtcaaatctctttatttttctttcactcagctgattagttctcaccagacatttacgttggtctgtgcgacctcccctttctgtgctcatcctccaccttagaggtctacaccacatcccttccaattatcttttctcctccatccaagcctgttcttgaataagttcactttagcataaatacctaatgattagacctttctttttgccttatgattattgttattattattgagatggagtctccctctgtcacccaggctggagttcagtggtgcaatctcagctcactgcaacctctgcctcctgggttcaagtgattctcgtgcttcagcctccaagtagctgggattacaggtgcacaccaccatgcccggctaatttttgtatttttagtggagatggggtttcaccatgtcggccaggctggttttgaaccccgtctcggcctcccaaagtgctgggactacaggcctgagccatcacaactggttttgctttaatattattattattgttgttattattatttttgagacggagtctcactctgttgcccaggagggagtgcagtggcacgatcttggctcactgcaacctccaccacccgggttcaagcagttctcctgcctcagcctcccaagtagctgggattacaggcgcccaccaccatgcctagttaatttttgtatatttagtagagatggggtttcaccatgttggccaggctggtctcaaactcctgacctcaagtgatccacccacctcggcctcccaaagtgttgggattacaggcatgagtcaccacacctggctggtatgtgtattttagccggaggaaagacattaggatacaaaaatgaatctctaatggtgaaatttgcaaccctttcatggtaaagaagataaatctgaggcaccaagaggctgaagtgacactactggctgctggcgtcttgagctggagccccttctttctcgtcccacaccacgcttctctcttgccaccttgacatcctgccatgcagcaacccctaccaaaaaatgcacttggatgttatggacctgggtatgcgaaagcaaactaaatctcgtgacgccaaagtaactaagccaaagggaaaagtcaacctgggaactgcgtcaggcaaacctgcctcccattttattcctaaataagatagctacaaagatttaaaaaaaaaaaaaaaaaaagctacatacctcccttgcagtttgcccacaaagaaattccctgtgagcctcaagatctttactctaaaatagttctgttggatttcaccctggcaatgtaaattgaaagctatcttcacaggtgtgggacaaaggccagaaatcaaagtcatccctctgctcacctgagacaaatgtgtatctaattgccctactgtttatggaaaaatgcagattcactgagccaggctaaggcataagtgactattcctctaccctgctctcacatgtaaattgtgtattcagcgaaaggctgatcagggactcaaaataatgcaaccgtttgcatcttatctacctaagacctggaaacccctgctttgagtggttctacctttccagaccgaacaaatgtacatcttaaatgtattgattgttatctcatgtctccctaaaatatataaagccaagctgtaccctgaccaccttgggcatatgtcattaggacctcctgaggctgtgttactggcaggtccttaacctttgcaaaataaactttccaattttttttttttttttgagacagagactcactttgtcacccaggctggagtgtagtggcacaatcccagttcactgtaacctctacctcccaggttcaagcaattctcctgcctcagcctcccaagaacctgggactacaggcatgcgccaccatgcccagctaacttttgtatttttagtagagacggagtttcaccatgttggccagtttggtctcaaacccctgacctcgggtgatccctctgtctcagcctcccaaagtgctgggattacaggcgagagccactgagtctggcccaattatgcttataactcaatagtcagttttctggattcctgaagcgcagcactttaaattatatgtagggcactgaaggattgtttgacatccacaccctggatcccaccagttccctaggcctgagaggcctgtctctcacttctttgccttggactgccacaccatttttcagcctgtcccccatgtcccatccccccaaatctccatgattcacaaggtatgtgagtgtatcagatttcattaaatggttgtggtaatctcaaactacgtacgaaatatatgagtaaagcatataagaattaggctatgtaagaagtttcctcttgttaaagggaaaatctggctgggcatgttggctcacacctataatcccaacaatttgagaggccaaggtgggcggatcacttgaggtcaggagtttgagaccagcctggccaacatggtgaaaccccatctctactaaaaatacaaaacttagctgggcatcgtggtgcatgcctgtaattccagctactcaggaggctgagcctggagaattgcttgaccctgggagtggaggttgcagtgagccgagatggcaccactgcactccagcttgagtgacagatggagactttgtctcaaaaaaaaaaaaaaaaaaaaaggaaaatctgaaaagttcaaatcttcactgggttttcttgttggcacacttcagtttctaaatcttcccccaccaactcacttcctacttcctgtcgaacatcctctttgactgccatgcatagctctatagcccattcaaaaccccagcccctgcccacaggacttagttttgggtccttgtctatgtccctccctgagcagaagacatggtcctgaaactgatttactaggtctggagtaatgccttggggcaagggggtcaggacagttctcgaagtcttggcattcctaatctcatcaaagagtccagtgtggatgtggatgccctaactccaaatcttcctaccagtgtagttgcagatacaactcttaatttctttttttgagacagagtctagctttgttgcccaggctggagtgcagtggcacaatctcggctcactgcaacctctgcctccccagttcaagcaattctcctgcctcagcctcccctagtaactgggattacaggcttgtgccaccatgcctggctaattttttatatttttggtagagacagggcttcgccatgttggccaggctggtctcgaactcctgacctcaggtgatccacttgcctcagcctcccaaagtgctgggattacaggtgtgagccactgtgctcaggcacgactcttaatttcttagttgcccaccagggaaccgaaggatcatatacacacaaacacacacacatagtctcctaaagacaaacataaattctcagtgcggtctaagtgcaaatggaggaagtaaaatgttttccaaacaccccctataatttgcacagtttctgttcccctatgaatatacaatttcacatttctttttttttttgagacggtgtctcgctctgtcacgaggctggagtgcagtggcgtgatcctggctcactgcaagctctgcctcctgggttcacgccattctcctgcctcagcctcccaagtagctgggactacaggtgcccgccaccacgcctggctaattttttttgtattttttagtagagatggggtttcaccgtgttagccaggatggtctcaatctcctgacctcgtgatctgcccgcctcagcctcccaaagtgctgggattacaggcgtgagccactgtgcctggccttcacatttctgtataaggcaatattaattccttttcttaatttgccttcccctttcccctttccagttgtgtcttctcaagcctgtttggaatatgaaagaggtctgtgactgagctgctgtgcctctcaacaactgctgtcagctacacaaagacccagctaaagctccaaaatgaatattgtgtgtgtgtgtgtgtgtgtgtgtgtagttattacttcgggctatttgtcctacatatattctatttcctgctttttaacaaaagtcttgtgacccaaagctgattcaaggtatccattattcagagtaaatagagagtcatagtcatcaaattccacatgagatcctctgaactcttgtgagtgcagagggagaggctccctaagaactacaatagagataataatagtgcttacctcatggggttgttgggaggtttcagtgactcatatataacgcaagtgtacacacagaatctgtaagtaaaatgctaagcatggtacctggtaagtgctttatacgtttttaaaaattattattatgtatatcatagctacagtttctacacaggatttcaaatttttttttttttttgagacagaatctcactctattgcccggctggagtgcagtggtgcgatcttggctcacggcaacctctgccttctgggttcacgtgattctcctgcctcagcctcctgagtagctgggactacaggtgcacaccaccatgcctggctaatttttgtatttttagtagagacggggtttcagcatgctgccaggatggtcttgatctcttgaccttgtgatccacccacctcagcctcccaaagtgctgggattacaggcatgagccactgcgcctggccaggatttcaattttttaaaatggcactgctcacttcgggaggccgaggcaggaggattgcttgaggctaggagtttgagatcagactgggcaacatagcaagatgctgtctctacaagaattttaaaaattagccaggcatgggcatgggggcacgtgccaggagtcccagctactcaggaggcgaggtgggagaattacttgaggctaggagtctgaggctgcagtgagacataattgcatcaccgcactccagcctgggtgacagagcaagacccgtctcaaaataataataatagtaataaataataaaaggtcattgctttaaaattgtttgaaaacctcagctctggatcaaacttcaaagtacaggctgaaggaaagtatcaattgtcaaagaaagacctttgtaccttcaaggaacccatgcttaaagaaaacacactctctttcatcatgtaaatcagccatgggttttgaaaaccataagaatcaggaacaggccaggtgcagtggctcatgcctgtaatcccaacactttgggaggctgaggccagaggtttgcttgagcccaggagttcaagaccagcctgggcaaaatagtgaaacctcatttctacaaaaaattagccaggcttagtggcacacacctatagtcctagctactcattcaggaggctgaggcaggaggatcacttgagcctgggaggttgaggctgcagtgagctatgatctcgccactgcactccagcccggacaacactctgcacttcattctggacaacagagcaagaccctgtcttaaaaaaaaaaaaatcagtaacatttgtggagcactttctatgtgctgaatgcattgatggtttattctctaaaacatccccataaggtaggctgcagtatcattaatgccattttacagatggggaacttgaagtcaactagcctaagagtaaacatattggctcacaaattgggaaatccaggggaaggctgtcttccgatgtggctgggcaggtgtagtgtgagccagtaggtcaaatcttgtgattatttctcgccttctccttcccaggtcagctgtgatctcagcaagcgtctttcctcatcaaaggctccatgcacgttcctcattcacatccaatgatgtagaaacttctcttctggtggatcttttggaaaattaggaaagctacttttttgtttgtttgttttttgaaacagtctcgctctgtcccccaggctggagtgcagtggcgcgatctcggctcaccgcaagctccgcctcccgggttcacgccattctcctgcctcagcctcctgagtagctgggactacaggcgcccgccactactcccggctaatttttttgtatttttagtagagacggggtttcaccgtgttagccaggatggtctcgatctcctgagctcgtgatccgcccaccttgacctcccaaagtgctgggattacaggcgtgagccaccgcgccctaccggaaagctacttttttgaaaggcttcagccggcttctcattgtctcactgccctgattcagaaataactgtggcccagggaaggaggagaggctggcttttcctaatgccttaaacctgaggctgagtatggaataaatcactccaaaattgcactccataaataggggaggaacttcctttgggaagttcagagttgttgcagatttgtatcccaggagctgattctgagaagagcattcatgtgcaggtttattagggggtgtccttaagacctgcacctgtggaagggaaggccagatagcaagagagggcacagggagaagctgggctgcgaggcagagtaagggctgcagccagccaggtgacccttcagacgtgcctgcattggagcaaggtgggcgggagtgagggggccaggcctttctcccatcccctccacaaaccaggtatggtctgtgggatgcccaggaaggaagcaaagcctggagtggggtgggtggccccttttttagaagagggtagttcctggagaggcaatcagccatcagcttacaacacttccagcagctgagagaagaaatccttccagcccgaggaggaatctgggcagcacatcccaggaatctggaagcagtcatggaaaaggaaacaagtcactgagaggccaatcctggatctcaactcagtcctttcagaggccactgctacagcccccacctcatcgcttcctgttcaatgtatgctgatttctacacactgaccgctgtaggcatttctggaaagaatcccagatcagagtttttaagtatcagctgcctatccacgtgtgtcttgtgagcaactaagagggctgaaggcaaggaggaaaccggtggtgatacacctcattgggtggttaaagagacaagatgtctggccagactctcaccagagaactgtccagtctgaacaaatgaggaacgtgaagaacttggaaaggttacaaggaagtcaccgcgatgatgaatgttttcctgaaccagcacggacaggaaagagcaaaggctgcaaatcagggctgaccttggtgatctccgtcttttacattgggatgcagaattcagcatgcaaccacatgcaatttacaagcacaggctccttctgggaaatgtgccaaattagttcattcctgacaaaataattaaaatcctacaaatattaggctcatgcatttagccattttatttcagctgttttgtgtgttcatagatagtgaaattaaaaacacttgtggcctggcatggtgggtcacacctgtaaacccagcactttgggaggctgaggcaggaggtctgcttgagctcaggagtttgagaccagcctaggcaacatagtgagatcttgtctctgcaaatattatttaagctcacaactataatcctagccctttgggaagccaaggcaggtggatcacttgaggccaggagttcgagaccagcccagccaatgtggtgaaatcccatctctactaaagatacaaaaaaattacaggtgcacacctgtagtcccagctactcgggaggctgaggcacaagaatcatttgaacctgggaggtggaggttgcagtgagcagagatgtgccactgcactccagcctgggcaacaaagcaagattctgtctcaaaaaaaaattattaaaaaaattatccaggggtggtggcgcacacctgtggtcccagttacttgggaggctgaggtgggaggatcacttaagcccaggaggtggaggctgcagtgagctatgttcatgctactgcactccagcctgggagacaaagcaagaccctgtctcaaaaatgtaaaattaaatattttaaaacaggacaacattacaaaatacaaataaaaacacgtgtattggggtcaagcacagggactcatgcctgtaatctcaacactttgggcatataaagtgggagcatcacttgagcagaggagttttgggccggcctgggcactgtagtgagatcctgtctctacacaaaataaacattaaaaattaggaggctggggcgggaggattgtttggacccgggagttcaagaccagcctaggctacatagagaaactccatctgtattgttaaagaaaaaaaaattaaaaattaaaaaaaaaaaacatgtattggaagaaaatactctggcagcttcaaaacacctgacaagagggggaaaccctgatacagcttcagaacttcagcccatggaagctgcattcaacaaactactgaatcatgtctggttcccatggcaacagccctgaagcggcttcactgaacaagactgaatgtgatcaactgccaacatggaaatatcaacccttcctctttgtttttcagcatttctctcactgacattctgtgttgcaaagcaggccttggaacgctgcccgtatctccctcctagattcaccaaatttcagcggtgaagcccccctccactgcatttttagtgtagaaccttgccagggttgggggtgggggaggtgggggccactgcatacattctaaaggacaaggaaaataatttcagatagttccttacccacccatgtccctcactaagagccctggtttttctctcaggcagtaacgcttctttctgttggactcaaatcagcatatttatgttccatagcaagacagatttcctaagtaagagagaagctatttttagaggatcttgaaaggggggaagatctcagaaacgacctaaacttagatccagcttttggtacagtgtgcctcacagggacatagactgcacgtgcacaaacatttcttgcagcctgttataaacttcctgagatgccctcaaagcctgcgctggggtggggcccagagcttccccctggaggtgccatagatccttgcccttctttccctttaagaacagcacactgtcagttctccagctcttgaagagccctacaatgaggtcagaccatatcagtggtacatctgggctgtctgtcagtgcatttgggtgagttcgcttcgagggaaagaatgtcagccgtagtgagtttgtggttagagagtcacttgtagatatgagtgtggaccccacgctggagtgcagtggcaccatctcagctcactgatggaatatttgatgatttctatcaccaaatgaagccaggggatgggtgtgtgggaggttatgatactattctcactaccatggtggatagtgagcataaaaattacacgtggccaggtgcggtggctcacacctgtaatcccagcactttgggaggccgaggcaggcggatcacctgaggttgggagtttaagaccagcctgaccaacatggagaaaccccgtctctactaaaaatataaaattagcccggcatggtggcgcatgcctgttatcccagctacttgggaggctgaggcaggagaatcgcttgaacctgggaggcggagcttgcagtgagctgagatggtgccactgcactccagcatgggtggcagagtgagactctgtctgaaaaaaaaaagaaaaaaaaaaaaaagaaagtacacataaccagccctggtggaaggttataaggttatgtgttcctggaggaagcattctttcaattgagacctcaaggataagatcagctagcaggcccaaactgagggtggagggatgaagtgtgaggtattggttggataagtgttccaggcagagaaaacaatgtaggcacatgcctgaaggtgaaagcaagctccttgggactggaagaagctcagtaggattgcattagagcctggcaatagatgaggcagagcactggaatggacggtcaggagacagtggtaaaaagtctgggcatttctctgaagagcaatgggaagccaatgaacaaggcatttacttgactgtattcatgctttaggaaaattacaattaagctttattgtcccaagatagtcctaactttaggaagtcttccttgggcagggagtggcggctcacgcctataatcctagcactttgggaggtggagatgggtggatcacttgaggccaggagttcaagaccagcctggccaatatggtgaaaccccatctctaaaatacaaaaattagcccggcgtggtggtgcgtgcctgtaatccagcaactcaggaagctgacacatgagaattgcttaagtccagaggcagaggttgcagtgagccgagattgtgccactgcactctagcctgggcaacagagcaagactccatctcaaaaaaaaaaaaaaaagtcttctttgaagatttctcaaagaactaccattcgacccggcaatccccctactgcatacatacccaaagggaaagacatcattatatactaaagatatttgcactcatgtttattgcagcactatttattcacaatagcaaagatgcagaatcaacctaagtgtctatcaatggatgattgaataaagaaaatgtagtgtatacatacacgcacacacacaccatgaaatacgactcagccataaaaaagaataaaatcatattatctgcagcaaaatggatggaatggaaggctactatcctaagggagataactcagaaacagaaagtcaaatactgcctgttcttacttataagtgggaactaaacaatgagtacacatggacattcagaatgaaatagtagacattggagactctgaaaggcgggagagtgggaggggaatgaggtttgaaaaattacttattgtaggctgagtgcagtggctcacacctgtaattccagcactttgagaggccagggtgggaggattacttgagcccaggagttttcagaccagcctgggcaacacaatgagacctcatctctacaaaaataaaagtaaaaattagctgggtgtggtggcacatgcctgtattcctagcgacttgagaggctaaggcaggagaattacttgagcccaggagttccaggttgcagtgagctatgattgcaccactgcacttcagcctgggagacagagcgagactctgtctctctttttttttttttttttttgagatggagtctcgctctgtcacccaggctggagtgcagtggcatgatctcagctcactgcaagctccgcctcctgggttcaagccattctcctgcctcagcctctcaagtagctgggactacaggcgcctgccaccacgcctggctaatttttttagtagagatggggttttactgtgttagtcaggatggtctcgatctcctgacctcgggatctgcctgcctcggcctcccaaagtgctgggattacaggagtgagcaaccgtgcccagccctgtctcttaaaaaaaaaaaaaaattactggccaggcgtggaggctcacacctgtaatgtaaaaaaaaaaaaatctagtgggtacaatgttcactatttgggtgatgggtacactaaaagctcaggtttaccacaacgcagtatgtgcatataagaaatctgcacttgtgcctcctaaatccatacaaataaaaaaaaatggccgtgtacagtggctcatgcctgtaatcccagcactttgggaggctgagtgtggatcacaaggtcaggagttcgagaccagcctggccaacatggtgaaaccccgtctctactaaaaatacaaaaattagctgggcgtggtggcaggcacatgtaatcccagatactcgggaggctgaggcaggagaattgcttgaacctaggaggcagaggttgcagtgagctgaagtcacgccactgcactccagcctgggggacagagtgagactctgtctaaaaaaaaaaaaaaaaaaaattagcctggcatggtcacgtgtgcgtgtggtcccagccactcaggaggctaaggtgggagaatggcttgagcccaggagtttgaggctacagtgagctatgatcatgccactggactccagtctgggtgacagaatgagattctgcctctaaagtaagtaaataaataaatacataatcaagcctcctttgaatattccagccctccttgctctgagctgcagattccaccctctcttactgtaggttgctattgtttcatgctaaggttaagtgaggccaaaagggtggaggcgtaggactggtagccttatagaaagaggaaaagagagagattgctgtctctccacatgcgtgcactgaggaaaggccatgtgggcacacagctagaaggcagccatctgccagccaggaagagagccctcaccacaccctgaccttgctgttatcctgatcttaggttttcagcctccagaactgtgagaaaatacatttctgttgcttcagccacccagtctgtgatattttactatgacagccaaagcagactaagacactcctctaagtccctctctatccagataatcgtcggctgggacaaactttagacacttcaaaagcttgtaatccattgaccttgactgatcattaaaaatcttcaacattatagccccattatagtcagtcacatttcatatttatatatgcaggtgattttctccactatcatgaggccaagctatggtgtaaggagatggttctcctgcagcagtaaatatgtctaatagttggatattaatgtaaccattaatctccctagttcaccctgaaaagacacaccttgtgtttttttcctatctgaaaacttccagtcattacatccacatgcaattgctgactcccaaggttgaatgagcggctcatggtctttagggcatgtgtttataagaagatagtctgtgtttacattgccacaatacaatgttaccttctactggctgcctttcataggcaaggcaactgttcaaaacaaattgcttggcatcctgtaatcccagctactccagaggctgaggcacgagaatcacttgcacctgggaggtggaggttgtagtgagccgcgattgtgccactgcgctccagcctgagcaacaagactgaagctctgtctcaaaaaaacaaaaacaaaaacaaattgcttggcaaatgatggtttttgcaattttggacatgatgcttaagttgactttcaatttccaacatgacagactactgaagtatgtttctttgcaaagtctctaagatctactaagtgaggcttttaagaaagcagcctaggctgggcacggtggctcacacctataatcccagtactttgggaggccagggcaggaggatcgcttgaggccaggagtttgagaccagcctgggcaacataatgagacctcgtctctctctctctctctctctctctctctcttttgtaagttaataattttttaaataaaaaatataataaaaatgaaggaggaggagaattgcttgaacccgggaggcagaggttgcagtaagccgagatcatgccgctgcactccagcctgggcaaaaagaacaaaattcatctcaagaataaaaaataaaaaaataaagcaggctgggtatagtggctcacacctgtaatcccaggattttgggaggctgaggtgggaggattacttgagtccaggaagttgaggccgcagtgagctatgattatgctgtctaatcatgattactctagcctgggtgacagagcaagatcctgtctcaaaaacaaaccccgaaaaaccaaaaacaaagcagagtaagaagcatcagcctttctggtaagatctgaggggatataagaaccctctcattgtcaatgatttctctcactatttcagtacctaaacaacctttacttgtcctttcttttggatattacatcttatatataatagccctttattaatatgattttatgctcatatatatgaatctgtatgaattttttctgtgagaatcaaacttaagaactgtcacttttttctttgtttttttttttttttggagacaaagtctcgctctatcacccaagctggagtgcagtggtgggatctcagctaactacaacctccgcctaccaggttcaagcaattcttctgcctcagcctcccgggtagctgggatttcaggtgcccgccaccacacctggctgattttttaaaatatatttttagtagagatgtggtttcaccatgtggaccaggctggtcttgaactcttgacctcgggtaatttgcctgcctcggcctcccaaagtgctgggattacaagcttgagccaccgtgcccgggcccttttctttttgttttgagatggggtcttgctctgttacccaggctggagtgcggtggtgtgatgtgaccacggctcactacagcctcaatttcccaggttcaagtgattctcccacctcagcctcctgagtagctgagattacaggtgtgcaccaccacactggactaactttttcatttttttgtagagacaaggtctcactatgttgcctaggctggtcttgaactgctgggctcaagcaatcctcctgcctctgcctctcaaagagctgagattataggtgtgagccgccatgcccgcccgtcacttttctgtatattcctaaataaaattaaatctggttcagcctctattgactttagtggtagataaattcaaccccatttttctggtgaagaggttcctctgcaattctttaggattatgccagcacccagggcttactcagtccagatgtcttgccttctgatccactggaagatgtagagttttactacccagctccagtgtcttctcccctcaagtttaggtggagcctgtttgtcaaggcctctgtgtaatacctagggccccaaaccatttgcatacatgcagccatcccattcagaggctctatctctacagagctgtaaacccttcctaccagtgtgcagggcagctaacaccctccatcctcactccaccccttatccttgtgcagtgtagctctgcccttccacaaagagcttgactgtcaccacgtcctcttataatcccacgcagtcccaccttctctcataatcccaaagaagatatgtcagggccaggacatctatggatatggtgtgagtgatattccagtggagtaactcccttccctactgtggtctttcttcttatacggcaagaatgagggccgggtgtagtgactcacgcctgtaatcccagcactttgggaggccaaggtgggcagatcacaaggtcaagacgatcaagaccagcctggccaacatggtgaaaccccatctctactaaaaatacaaaaattagctgggtgtggtggtggccacctgtagtcccagctactcaggaggctgaggcgggagaatcgcttgaacccgggaggcggaggttgcagtgagccgagatcacgccactgcactccagcctggcgacagagcgagtctccattccccccaccccctccccataaaaagcaagaatgagaaagtgcccttgtcaacgaaggatcgcatggactggtaccaagtggttcggatctgggaagtcagctgtaaaatggagttgtctaggaatatcaagagccttacggctggggcagttggggaccttctagtccctgggctgttgcatttccccactggccaagtatcccaggccaataggcactggagcttgggtgctgtcctttcactggaatgggcctactgtgtgtccagcagctgtcttggctatggcagattggtccttgatttgatgagaggctgaagaccacatgtgactttgtcttgctatcctggtcttgtagaactcaccttttcacaatgaagactttttctcaaccgatgttgtacaatgtgaaatgtgtccaccctcttgcaggacaaatggcagacctgaagagacccatctggcaccacagccaattttcttcttttttttgagacggagtcttgctctgtcgcccaggctggagtgcagtggcgcgatctcggctcactgcaagctccacctcccgggttcacgccattctcctgcctcagcgtcccgagtagttgggactacaggtgcccgccaccacgcccggctaattttttttgtatttttagtagagacagggtttcaccctattagccgggatggtcttgatctcctgaccttgtgatccgcccttctcggcctcccaaagtgctgggattacagacttgagccaccgcgcccggccaccacaaccaattttcaacatgctgctgggtgtgagataatcagaaaagcatggagcataggtagacatttaatggtcttttgagtccaacctctacattttactgataattaatttggagaatccattgtccttccaagattgattacccatttctcattttgaggaacgtttaacagcaagaagattggatcaggtttctgagtgagccccaagaactttgtctctgagagctttcaaggtttgagtgactcctttgcattttgagtacatattccaagggcattttcctttggctgtttgtgatcagagattattgtggtcatgatgtgcctgcacattattgctgcaatagcaaaccactcatcttatttgctggtgtctctgtgggtcagtctttgggttggactcagctgggcagttcttctgacgctctcacctggggtcatagtggtagggagagtaacaatcctcctgaagatgtcaattccctaatccttggttttagacctgcgcaagctacattacctagtaaaggggactttgcaaatgcaattaaatttatggacttttgggttaggaaattatcctggactgtctggacaggtctaacgtagttacatgggcccttaaaagtagaaaagaaactttgggaggctgagatgggcagatcgcttgagcccaagagttcaggaccagcctgggcaccatggcaaaatcctgactctaggggaggttcaaagcatgaaagggacttgcctaccattgttggctttgaattagaggaagggggccataagccaagggacagcctctagaagcagggaacagccctcactcacagccagcaaggggacctcagttctacagccgaaagggactgaattctgccaatagcctgaatgagtaaagaaacagcttctcctcatagagcctccagaaaggagcgctggtatctcactgtggtttcaatttgcatttccctggtgattagtgatgttgagcgtcttttcatgtgcttgttggccattcgtatgtcttctttggagaaatgtttatttgcccatgtttactggggttgtttgttttgttgtaggaatccttcatatggcttgcatatcaaccctttattatatatataatttcaaatattttctcccattctgtaggctacctcttcagtcttttgatagtgtcttttgaggcacagaaatttcaaattttggtgtaacctaatttatctatttttacttttgttgcctgtacttttggcatgatatctaagaaattattgtgaaatccaatgttatgaagctttctccctaaattttcttccaagagttttatagttgggagagttttaagcagtgaagtgctatatgggaggctggacagggcagggatgtgggaagctgattgtgttgaaagtcccagtcttcatccctcccctcatctacatgctttgctgtcacattgcagctccacccaacaagaggcaacatgcactttcctaccacttgactttatttcagccatgtacttggtaaagactttctactctgactctgggcttgaccatatgacttgctttggcccatataatgagacagaagtgatggcacagcagttccaagccaaggcttcaaggagccttgcaggtttccacttgctatcttgtgcttctgccatcgtcccgagaacctgcccaggcgagcccgctggaggatgagaaacacacagagcagagctgaatagcctcagtcaactcaaccagctgatccccagacatgggcgtgagccatcagctggtccccagttaaccccagaggcattagtattgcaggccactgaggttttgtggctgtttcttatgaaatgtactccataatatccaataaggatattcagtaaggatgatatggcattggataactgatacagcgagcagattggaagcagagagatgtgttgggaggatattacaataattcaggtgagagatgatagctgtgaaggtgatgacaagaggttggattctggatgtatcttgaaggtggtgctgatggatttgctctcacattggaaatagggtatggggaagagagaccagctgaggatcactccatgggttttgagcatctggaaggatgaaattgccactagctgtggtaggatgactgcaggaggagcaggtttggggaggctatcagggactcagttttgaatattcacacattcagggattttgggagagttgacacatatccctggactttgggagtgctcataaagccagaggctggcagtgcttcttgaatgaaaaactgtgaaaaggggaggcctgatgaagcagcctgttgtggataagcatgccccacaaggaaaggatgagggctttccctttgcctgagggcaggaagagtgcatcaagggtcccacgcctccttatgaaggagcataaagtggagtggtgggtggatacctagggctgcccaggtggtgtccagcaaagagaagcttcccccggagaaaggctagagtacagaggctggtagaggctgaggggagacctgactgcctttgcctgagggatgacctcaggagtagaaagggctcacatgaagtcatgtggcattccgaaagaatggcactcaccatctcagcggagcccaccgcctctatgggggcctccagctgcagagcccagcctgagagaatcctcctaggagggcagtcaaggaggaggtcagagcctcttctcctcatgaatgccaacggtggagaactaggctggaaagggcacctgggcgaggtggggaacagggagaatcctggaacatagatttccagctctcggagaggaagagtctaacttttttttttgagacagagtctcgccctgtcacccaggctggagggcaggggttgcagttagccaagatcacaccactgcactctagcctgagtgacagagtgagactcggtctcaataaacaaaaaaacaagaagaagttggtgtgaatttgagagctgtattgttaaggctccagtagcatctattgtagatatcactgagggatgggaagggggattcaaagagcatggtagaaaatgcaattagagaaaatagaattttctttttttccacacgcactagattgaatgaaaatagttttcaaaacccctctgccttgcactccctaatgaacggatgatacacatgaattaaactgtgggtggcttaatagctggagagaggccacaagtataggcagaaatgaacacacatgtgttgcaacagaagcactcaagacgcaacagtgaaattcactagcagaaaatcgaggtgagaagaaatcgaaaattgttcttttaaacctaccgcttttgctgactgtcattaaaaatgtgaaaacaggtggtaatggaaccataagtgattagttttctttccttctgcatgattataatgatgtttgagagtgaaacaatgctcctaaaatttattacttttttgtccactaaaaaaaatgcccccatctttaactttagtggcacaaatcatctatttttctaacaacctcagaaactcagtatgatgtcccctttgaaaataatggaaagttgccgggcgcggtggctcatgcctgtaatcccagcactttgggaggccgaggcgggtggatcacgaggtcaggagatcgagaccatcctggctaacacagtgaaaccccgtctctactaaaaatacaaaaaaattagccaggcgtggtggcaggcacctgtagtcccagctgcttgggaggctgaggcaggagaatggcatgaacccagaaggtggagcttgcagtgagccgagatcgcgccaccgcactccagcctgggcaaccgagcgagactccatctcaaaaaaaaaaaaaaaaagaaaaagaaaataatggaaagtttgtgctcagctccttcagtgtctgcagcaagacagcaaatgagacccatgagaatctggggctcaggcaaaagttccagaagaagtttaaatgctgaggtggggcctgtgaaggagggagggagcgctggagaccaggggccttggcgatctgtttacaacacaagggtgaccagagctgtctgtctgtagagggccctgatgggagcagaggcatccagacaaacagggctcatgctcttctgggaatccctgcctcaccatgaaacagaagagagagattccaccaactgcttggatatgtcccctttacatttctccagcccagatggtggtggtggtggtggtgttgttttgagaaaaagtcttgctctgtcacccaggctggagtgcagtggtgcgatctcagctcactgcaacctccacctcctgggtccaagagattctcccccctcagcctcctgagtagctggaattacaagcgtataccaccatgcctggctaattttcgtattttagagacggggtttcgccatgtgggccaggctggtctcaaactcctgacctcaggtgatctgcctgccttggcctctcaaagtgctgggattacaggcgtgagccaccatgccctgctccagattggtaagaacccagtgctttccttggtgtataacaattaccccacactcttgagtgtcttaaaatagtcagcagacgttaaaagttgcatcagaatcttttttttttcttttgagacggagtcttgctgtgtcacccaggctggagtgcagtggcacaatctcggctcactgcaagctctgcctcccgggttcacaccattctcctgcctcaacctcccgagtagctaggactacaggcacctgccaccacgcccgtctaattttttgtatttttagtagagatggggtttcaccgtgttagccaggatggtctcgatcccctgaccttgtgatccacccacctcggcctcccaaagtgctgggattacaaggcgtgagccaccgcgcccggcctgcatcagaatcctttttttaaaaaaagttaccttggaccaggcagggtggctcactcctgtaatcccagcactttgggaggccaaggcaggtggattatctgaggttaggagttcgagacccgcctgaccaacatggtgaaactctgtctctactaaaaatacaaaattagccagacatggtggtgcacacctgtaatcccagctactggggaggctgaggcagaagaatcgcttgaacccaggaagtggaggttgcggtgagccgagattgtgccattgcactccagcctgggcaacaagagcaaaactccgtctcaaataaataaataaataaaaaataaatataaaaaagtgatcttatattagtctgttctcatgctgctataaagaacttccctagactgggtaatttataagggaaagaggtgtaactgacccacggttccacatgactggggaggcctcaggaaacttacaatcatggcagaaggggaaacaagccgtcttacgtggcagcaggtgaggccgggggtgtggggagagggagagagcacgtgtaagcacaggaaaaactactctttaaaaccgtcagatcgcatgagaactcactatcatgaaaacagcacgggggaactgcccccataatccaatcacctcctaccaggtctctccgttaacgcctggggattacaagtcaagatgagatttgggtgagaacacaaagcctaatcatatcagatctgtttttattttattttattttattttattttattttattttattttattttattttatttattattttattttattattttattttattattttattttattttattttatattttattttattttattttgagagggagtctaactctgtcacccaggctggagcgcagtgccgcgacctccgctcactgcaagctccgcctcccgggttcccgccattctcctgcctcagcctccagagtagtggggactacaggcgcccaccactacgcccggctaattttttatatttttagtagagacggggtttcacctgtgttagccaggatgatctcgatctcctgacctcgtgatccgcccgcttcggcctcccaaagtgctgggattacaggcgtgagccaccgcacccggccatatctgtttttaaatatacataatattgaattatatctgttcttatgtttaaagtactagtaggaaatacccaaaatattaataatctttgtaactgagggataggtttatacttgatttttacttttacttttcatttatctgtagtgcctatattgtctacaataaacatgtattatatatttacttttgttgtaaggaacaaaggtttttctaaaagtggggagtgagacttaacccctgaactccccccaaaaagaccattgaatttgttttcatgagaattaaacatttcttgagtcaaagacaccaaaagtgaacttaacagcagatgaactgagaaaaagtatttacaatgtgcagagcagaaaaagagttttatttttctgaaaacatttttatttatttatttattttgagacagggtctcactttgtcacccaggctgcaatgcagtgctattatctcagctcactgcagccttgacctcctgggttcaagtgatcctctaacctcagccccccaagtatcggggactacaggtgcacgcaccaccgcacccaactaattatttgtattttttgtagagacagattttcgctatgttgcccaggctcaaacttctgggctacagcaatctgcccaccttgacctcccaaagtgctaggattacaggcatgagccaccatgcttggccaggaaaagaattttaatcattatatacatatacgtgtgtgtgtgtgtgtgtatacatatatataaaacaagtcaataagaaaaataaaaacaatcaatagaaaattgaacaaaagataacagcaatttacagaagttgaagaaaaaagtccaataaatatatgaaaagattttaatctcattaaaaacgaaggaaatagaggtcacaaccattaataaaatattttttgccaaaaaaattttttttgcttatcactttagaaaataccttaaaaatcactagcaatcagagtttgtgaggatggttattctcgctaataataccaaccatctatgtgtatacctactgttggtggaactgaaaattggcagagccctttctgaaaagaacttagtggtatatgtcaatactttaggtatgcatgccctatgacacagtggttccaatttcaggtatctattccagagaaatatttgcccatgtgcatgaagaggtgtgtacaagaagaggcatgagtcataaagcactggaaacaacacaaatgtctagcatggaagaatggttatgtaaactatgattggtctgttctattgaaaaaccacacagcacctaaaacaattagaaagacctatatgtggtgacatggcaagatagagcaacatagctcaggggtaaccactgagggcctgtctggattcaaatcatgtttctgaaacttcctgtctgtcagaccttggagaagccgcctaaagcgctctaagtttccacttccccatttgtaaaatcggaaagatagtattatgtgcctcctagggctgttaatgagaattaaatggggcaatacatgcactgtgttttttttttttttttttttttgagacagggacttgctctatcatctagagtagagtgcagtggcattatcatggctcattgcagccttgacctcccaggttcaaatgatcctcctacctcagcctcctgggactgtagctgggaatacaggagtgcaccactgtgcttggctaatttttatttttttgtagagatgggatcttgctatgttgcccagggtagtctcgaactcctgggctcaagtgatccacccgcctcagcatcccaaagtgctgggattagaggtattagccactttgcctggccatacacaacattttgaactgtgtgtgtctcacagtaatttatcaataaaaatacaaacttttgcatattagagaaaagcaagttgtagaacaccaaacatgatatcaaagccttaatactaaaggtaatatatgtgggtatgcctatatatgcatagaaaatggcccagtagaaaacatgtctcattaatagcggtgtttatttctgataaaggaaaggactgggataaggctggggtaggaaagctgtcatatcaactctacacttcagtattatttacttttttacagaaataaatgtaacttgtttgctgcatgcaggcacttgcatgcgcacgcgcgcacacacacacacacacacacacacacatatgcatacaccagttaccttgggcaaggcaatataggctttgactctagtttgaagatttcaagagtaccaaatgttttactcaaggaatttgagcaattgtgcaattttcaacagtgttttgtgtctattttggctacacagagaacttcctcaacaacatggaaacagacgagtttagattgtagttaacaagaataatttgcagaaatagaaagaagcaaataatctgttctgttaataacactcatctgtcacccatgcaatgcctttcacagttgactgagagccaattttatcttgctgtcacatagagtgtcctttttatcattgcagttgcacacttcccacaatctttaggcaaagaggcggaactgcctcatctacgtgtatagaagttatcttgttgcccgggttggagtgtgcagtgtgcagtcttgcctcactgcagccttgacctcctgggtttaagcaatcctcctgcctcagcctcctgagtttctaggactacatacatgccaccatgctgggctaattaaaaaaaattttttttgtagagatagggtcttgctatgttgcccaggctgctctcaaactcctggcttcaagtgattctcccacctcagcgttctaatatgtagggattataggtgtcagccaccatgctcagcctctcttgtgtctctgaagaaggtgctggtgaagaaaggatctggggcgtcccaggtgagggagaactttccaacgcatgcaatccatcttgggcctcaggtgacacccttgtatcattctgaattaggaaacgcttcatttttttaaacctcattatgcaaggagaatattttttaaaatattttaaggccaggcgcagtggcttatgcctgtaatcctagcacttttggaggccgaggcaggtggatcacctgaggttgggagtttgagaccagcctggccaacatggtgaaaccccatctctactaacaacacaaaaagtacactgggcatggtggtgcctgcctgtaatctcagctacttgggaggctgaggcaggagaatcgcttgaacctgggaggcagaggttggaggaagctgagattgtgccactgcactccggcctgggcgacagaaggagactctgtttcaaaaaagaaaaaaaaatgcaatcaaaacaaaaataataatcattatgatatgatacccatggattaaccactcagatttaatggatttgaacatttttacacaatagattctggtgtgattttttaaaaaaagtttattaaaaaaaataaaactggctgggcacggaggctcacgcctataatcccagcactttgggaagctgaggcgggtggatagcctgagatcaagagtttgaaaccagtctggccaacatggtgaaaccctgactctactaaaaatacaaaaattatccaggcgtggtggcacatgcctgtaatcccagctactcgggaggctgaggcagaagaattgctggaacccaggaggtggaggttgcggtgagccgagatctcaccactgcactccagcctgggcaacagagctagactcggtgtcaaagaaataaatcaattagattaaatttaaaaaaaaactatgcaactacagctaactccttccaccctgtcccaatcctttcttgtacttccttttgcagaggtaaccagcttcctgaactgagagagatcattagtgagcatagttttattttcttctttttttctttttctttttatttaaataatagggacgaggtcttgctatgttgaacagtctggtcttgaactcctggcctcaagcaatcctcccatctcagcctcccaaagtgctgggattatagacgtgagccaccatacccagccaactaatgagcatagttttaaatctccccacataaatacgtgcatcattcagggccttgacaagcatgtgcaaacggggtcatggaagacaatttcataaaagttctctttgcaaatgtagaggctgcaataagggaccccagaaagggatggtgaagcatcttgggggtagcaactggaggtcccctgctacagaactcagaaagacttgccactgtagcagagggttaccgacagtacttgtggtcttcagtgaacaaatgcagcctctgcaaacccctggcaaagagggagtaggcaaggagaggaagagagttaattccccctgcctgtctcttctcctcccctctgactcctactggtgcttcccattggatgaacccaaccaaagacagagaaaagagttctctgataaggtctgtaaagcttcccagggccagaagtaggtagagaaggccaggaagaggatgtgacagctggagaatatgtgtccacaaacaacacaaagcattatttgtgtgttttacaaattctcttaaacgatatcacgcttttacatggtttttgtttgtttttctcgagacagaatctcactcttattgcccagactggagtgcagtagcgcgatctcggctcactgcaacctccacctcctgggttcaagcgattctcccgcctcagctaccaagtagctgggattacaggcatgcgccaccacacccagctaatttttttctgtttagtagagatggggtttcaccatgttggccaggatggtctctaactcctgacctcaagtgatccacctgtcttggcctctcaaagtgctaggattataggcgtgagccaccgtgcctggcctaattcctgcatttattttaactactctgtagtattccattgttttgctatcccgagaaatgttgcaatgaacaggcttaggtacacacggcctgacccataagctcaagaaacttgcttgggtatttatacagaagtaaatttggctgcgtgtggtggctcatgcatgcaatcccaacactttcgaaggtcaaggtgggcagatcacttgaggtcaggagtttgagaccagcctggccaacatagcgaaaccccgtctctcctgaaaatacaaaaaattatttgggcatggtggtacacacctgtaagtccagctactcaggaggctgagacatgagaatcacttgaacccaggaggcagaggttgcagtgagctgagatcgcaccactgcaccccagcctaggcaacagagcaagactctgtctcaaaaagaacaacaaaaaaacctgcttaaaaaaaaatatatttgttgaattgaaattatgtacatatcaactttactaagtactgcaaaattgttctctattgtaattattccaatttttcactcccacagactgagtataaaagcccgtttctgattctccaccctcaccacagttagtgttatcaggattgaaaaagttgccaatctaatggctctgaaattgtgtctcatggttattttaatttgcatttccctgctctatacttttctatacctcataatctccaatggtgacactgaaatcatgacaaaccttctattatcacaaagcaggtattaatgctgctaatgttcacagaatcaatggccattacaaaatgtgccttcagttgattgctcacacctcagactccttgagttttccatacatacagctcatgaatgccagattacatgctgagcgatttcatgaaggaatgcttgccaatcagctccatgagaaagcgattcaaaatgatgttggtttcctatgttttcttgtcacttttgaagaatcctgttgaaatgcaagtcacttatggaatgagctccaagatcttttttttttcccacatgaaaaatacaagatatgaaacagcaggtgttagcaggtttgtgtttgtttaaaatttaaaaacatgtaaaatgcttatgagagtgtgcctctggggaggaaacataatttcagacttacagtgggaaatagatttagttttcatatagaactcttgaaaatttttcgcttttgttttttttttaccacctccaaataggctaacaaaccaaaaaaatatgatctgattaaaacacaatttgtgacttttttaaaatcccaaattcttttgttttaacttgccattaaatggatgattaaatactgttttggtccactgcggctgttataacagaatatcatagtctgggtggcttataaacaacagaaatctatttctcacagttctggtagctgtgaatttcaagaacaaggcaatagcagattcagcctctggtgagggcccacttcctggttcataaagcctcttgctataatcttgcatagcagaaggggacaggggaactctctggggtcgctctctcttttttttttttttttttttttttgagacggagtttttctctcgttgcccaggctagagtgcaatggtgcaatcttggctcactgcaacctccacctcccaggttcaagcgattctcctgcctcagcctcctgagtagctgggattacaggcatgtgccaccatgcccggctaatttttgtatttttagtagagacagggtttctccatgttggtcaggttggtctcgaactcccgacctcaggtgatccacctgcctcagcctcccaaagtgccaggattacaggcttgagccaccacacctggcctggggtctcttttatgaggacactaatcccattcatgagggctccaccctcatgacctaatcacctcccaaaggccccagttcctagcccattgcattggggattaggttttaatgtataaattttggggggacatgaacattcagtctatagcaaatacagagctatgtgaaagggaaatttctaaaatcagagatttccttttactataaacaatacacactcttctttcggtttaaaagtcatcataaatggaggccagtttaacaccctggaaaagaaggacaaacagttgtcaaactactgcaaaattgcttagaaaactttaggccagtctcatgtttttatttcaaggaagttgtgaaatttacttttccatctataaaacagcagtgtgactgtgctctgtggaaatcaattttttatttagaaaaaatattccattgtgcattcctcccatatgagcaacacatttacctaggaagatagcagatgattttgtaaccctaggtatccacatgcatgatcactttgtcctcttccactcctgtgataactccctccacagtgccattagtgctttgccctggttcctgggaagggacacatggatgagtgaaaacattttcctgggagcaaagcaactatccagatcaatcaaattcttttccccatggactcaaatacacatttcctacctaacaagttttttttttttttttttttttttttttgagacggagtctcactctgtcacccaggctgaatggagtgaagtggcatgatcatggctcactgcaacctccacctcccaggttcaagtgattctcctgccttagcctcccaagtagctgggattacaggcagccgccaccaaacacagctaatttttgtatttttggtagagatggggtttccaccatgctggccaggcttgtctcaaactcctgaccttaggtgatccatctgcttcggcctcccaaagtgctgggattacaggcatgagccaccgtgcccagccttctttttttttttttttttaaatttgagacagattgtccctctgtcatccaggctggagtgcaggatctcgatctcagttcactccaacttctacctcccaggttcaagagattctcatgcctcagcattcccagtagctgggattaaaagtgtgtgagaccacgcccggctaatttttgtatttttagtagagacagggtttcaccatgttggccaggctggtctcaaactcttgacctcaagcgatctgcccacctcagcctcccaaagtactgagattacaggcgtgagccaccacacccggcttctatcaagtattttaaaaaatatatttttttcattgatcaataactgaaaaaatgtttcattttgaaggtaagttgtatgttggctggttgttttttgggagctgatgttaaaggcactattataataatagatatactagatatgattgttattttatgtacaatttcaatatatgtatagacaaaatcatgtaataatttatacagtatttaaaattttgaaagcagtttcataaactttcccccctccttcctgcataacaagttcttttgaacctaccagaactatttatttatttatttttcttttttttttttgagacagggtctcactctgtcactcaggctggagtgcagtggtgtgatcacagctcactcccaggctcaagggatccttccacctcagtctcttgagtagctgggaccaccggtgcacaccacaacgcctggctaattttttgtatttttggtagagacagggttttgccatgttgtccagactggtcttgaattcatgagctcaaggagatccacctgtcttggcctcccaaagtgctaagattacaggcgtgagccaccgtgcctgaattgttcaaggacaattcagaaatccaaatccatatggctaattctattcatttactcattctttctcccagatttttattcaacaagcatatattgagtgtacattgtgagctagagatgggttaggtgctgagatagaaagatgcatagaaatcccagtaagatgccacaatatagtagaagagacaggatgtatggatagctaattgcaataaagcactacaagggctgtgagagtcagctatatccaacctagagcatgtaggtcagttagctattactgtgtaactaacagcccataaattctttataacatacggtaccattttgctcatgcatctaggagttgtctgggtgtcagctgatctaggcaggctcagctgggatgacttgacttgcctccatatatctctcatcttcctcctggaactaaagggctggcctacacatgttcttttcattcttatagcagaggggcaggaaggaacatacgtggcttcttaaggcctaggtacaaaactggcacattgtcacctcccatttttcactggctaaagtaagtcatgtggccaaacccaaagccaaagagtcaataaatatattccatccatttagagggaaggatcacacatttattcagaaaatggcatgaaaaatggggagtgagtgaagtatttcaattaataatatgacctttcagagatggatacagaatgagaaataattggctgaggtgcaagcaaaagatgctgaggaaagtggtgagcatctgtatttttcactctcataagtggttcactatcccctcccctcccctcccccctcactccgtccctccctccctccctccctcccttccttccttccctttttttgaacggggtctctctctgtagcccaggctggagtacagtggtgcaatcatagttcactgcagcctcctggggcacaagcaatcctcccacctcagtctcccaagaagctgggactacaggcatgtgccaccatgcctggctaatttttaaaaatttttttgtggtgtctgagcacagtggctcatgcctgtagtcccaacactttgggaggcccaggcaggtggatcacttgagcccaggagttcgagaccagcttgggcaacatggtgagatacaaaaagatttaaaaattagctgggcttggtggcacacacctgtagtcctagctactttggaagctgaagtgggtagatcacttaagcctggaaggcagacgttgccatgagctgagatcacaccgttgcactacaacctgagtgacagaatgagaccctgtctcaaaaaataaatataaatgcatacataaataaataaattttttgtagacggaggaggtctcactcctggtttcccaggctgatctcaagctcctgggctcaagcaatccttctgtcttggcctcccaaagtgctgggattacaggtgtgagccaccacgcctggccatggttcactattatttcattaattttactttgttcccttcgcataggttgtaaattccttgtgagcagaactataaattacatgtgctctgtgttcctctccacactttggcttatactggtttattaatggattgactattaataatggactcagggaatagaaactacaaagaacataggataccattcctggttggatgcagtggctcacgcctgtaatcccagcacactgggaggccgaggtgggtggatcacctgaggtcgggagttcgagaccagcctggccaacatggtgaaaccctcgtctctactaaaaatacaaaaattagccaggtgtggtggcgagtccctgtggtcccagctattcaggaggctgaggcacgagaatcacttgaacctgggaggtggaggttgcagtgagccaagatcatcccactgcactcgagcctgggcaacagagcaagactccatctcagaataataataataataaaagacacgataccattcctttcagaaatgtctgttaccttttgtaatcatagtgatcaagactactagttgacttcaattagcctacttgagataaaacttctgaaatgcctggatttctactgtgttggaattttttttttttttgagacggagtctcgctctgtcgcccaggctggagtgcagtggcgcaatctcggctcactgcaagctctgcctcccgggttcacgccattctcctgcctcagcctcccgagtagctgggactacaggcgcccgccaccacgcccagctaatttcttttagtatttttagtagagatggggtttcaccgtgttaaccaggatggtctcaatctcctgacctcttgatccgcccacctcagcctcccggaatttttatccctgatatcactatttctcatttaatggtgtctcttggattgagaaatgatgtgatttaccttctttatctctttagaagaaatagctcaacgtctacgtctgcctcatcaaagtattggactccacattaaactaaagaaattatccaaagacagtagttataggatgaaattcaatttttctgaagagtgatgataagtagtctcaggtgtgtaagcatcctaccaaactgcctggctttgctggcaataaaaatacatttcttattttttaatttttaaaataaagacaaggtctccctatgttgcccaggctggtcttgaactcctaggctcaagtgatcctctcacctcagccttccaatgtgctgggattgcaggcgtaagccaccataccggccatatattttttacttccagaaggaagagtagaaattgtcggtttcagtttttaagtctctgtattggtcacatctatgaggttgtctcagagcgaccatcttttgcatgtatgtatgtatgtatgtatgcacgtatgtatgtatgtatgtatgtattggctagtgtgggttgagttatgctgtgcttaaagcctcagaatcgttgcttgaaacattatgttcatccggggttagctagggctctgtgcctcgtcaccatcagcctccctctaggtcaaaggccaatggagcaaccaccatcttgagcattgcgggccgtcactgcagaagggaaagagctctggagggtcttacaccagcaattaaaccttcaactcaggctgggcgcagtggctcacgcctgtaatcccagcactttgggaaggctgaggtgggcagattacttgagaccaggagtttgagaccagtctgggcaacatggagaaacctaatctctactaaaaatacaaacccaaaaaaaaattagccaggtagggtgcccatgtttgtagtcccagctacttgggagactgaggcaggagaattgcttgaacctgggaggtggaggttgcagtgagccaagattgcaccactgcactccagctgggtgacacagcgagactctgtctcaaaaataaataaataaataaaccttcaactcagaagtggctctttgccttaaattcattggccagcattagtcacatcattcacttaacaatgagcctggaaggctcatgagggctcaggaagtataatcctatcatttacctggaaaggggagaactgaaagaaagagaagtaccagaatatttgggtactacacacatatttaccttcttagtttcctgatccttaagggaactgggaattctgagtggacagtgaggaagtgcaggaaaaagtgggaaaggacaggctacttggagccttcacctgagccaagcttgctgaaaatgggtgaaatctgtggtgcctcaactctgcctggtctgaatgctctgccgagcctggctcctctgacttacttgttctgtgatctaagcctcaatttcttcaactttaaaatgaagatgatagtagaacctacctcagaggaggtgtgatgattgcataaggtaatacatgtgagtgacttggaacagcactgtaaaactttctgcaatgacggaaatcttctacgctgtctgatacagtagccactggctactgagtgcttggagtgtagctagtgcaaccaagaaactgaattattaattctgtcacccaggctggagtgcagtgacatgaccttggctcactgcaacctccgcctcccaggttcgagggattctcctgcctcagcctccggagtagctgggattacagatgcccaccaccaggcccggctactttttgtatttttagtagagacagggttttcaccatgttgtccaggctggtctcgaaattcctgaccacaggtgatccgcccacctcggcctcccaaagtgctgggattacaggtgttagccaccgtgcccaggctaaatgattaattttatctaattttaattaatttaaatttacatgtacattgccacatgtggctatagctattgcatgagacagtgcagacttaagactttggcctggcaccgtggctcacacctgtaattccagcacttcgggaggcaaagacaggaggatcacttgcgcctgggagttcaagaccagcctaggcaacctagtgagatcctgtctccataagaaattgaattagttgagcacggtgatgcacatctgtagtcccggctactctgaaggccaaggtgagaggatcacttgagcccaggaggtcaaggctgcagtgagccgtgatcgcaccactgcaccccggcctgggtggcagaatgagaacctgtctctcaacaaaacgaaacaaacattgcttaacacatagggagcattcaacaagggttagctaagtgtcaaattgctacagccagagtggcagaagaagactcaacccagaagtcgaagaaaatgagaaaacgtctagatttgaaggaatgacctcccacagagcattgccccccttcactttaccttcaggtaacggcttcgaagagaagatctgcaaccatctaaaggaaacgttggggatgttttgttcctcttagtcacctttgcttgggtaggaagtcactcctcacatagaaagacttggccatgggcagcagcgcaggtgggaggcatatgggtgcgcactcacctcaccttccagttcagcacaggctccctttacaccctagctgccccgtgtcctcatgctgagcccacggcagatctttgtcctgtccaggacttcatcctccttgcctctagatctccagtgtcaagttagcatctgcatcagtttcccagggctgccataacaaagtgtcacaatctgagtggcttctctgacagttctggagaccagaagtcaaggtgtaggcaggaccgtgtgctctgaatgttctagggggagaatctattccatgcctttttcttagcttctgggcattcctgggttcttgcgtgtattgctccaatctctattcctgtcatcacaacagggcactctctttgagtgtctgtgtttccttttgtgtctgtgtcttgtgttacttctctctctctctcttttttttttttttttttttttgagacagggtcttactctgtcacccaggctggagtagtacagtggcgtgaacttggctcactgcaacctctgcctcctgggctcaagcgatcctcccacctcagcctcctgagtagctgggactacgggtgcatgccaccacacctggctaatttttgtattcttggtagagatggggtttcaccatgttgcccaggctggtcttgaactcctgagctcaagtgatccacccaccttggcctcccaaagtgctggaattacaggcatgagccactgcacctggcctcttcccctcttacaaagacaccagtcatattggattagggcccatttaatccagtatgacctcatcttaacctgattgcatctgcagggaccctatttccaaataagatcacattcacaggtcccaggggttgggaccttaacatatctgcttgagggacgcagtttagcccacaacagttaccattccgtcgtgggcttattttctgctgggtggcagctactttatctgtcacagttttgaggaggacacttgtcattctgtgtgcctggtatccttctcctgagaataactgagctgctgctaacatgaagatggtttagggcaaaaattttaaaaaggcactccctttgggtagacaaattgcaaaattcgtgcccactccatgtgatgaattacagacagtttgcaccttccccttcctgctcatgcaaggaagtgttgcgcccttcctctttccctttgtgtctgcttggaattgggtctgattggaattgggtttcgtcacttgcaaccaaagaatcctgactgacatagatggtacttggcgccatgaattaatgtgttgcctctcataactaatttcctggaggtaatccattcacttgaatgaagattggagcactgtgaccagcagtgcaactttatggctttggctgttagggatctccatgccccctaggtccagtttaggctgctccctgttagacctgtagcaggtgctcttcttgcccaccatgtcccctcactctgacctctccatcgggcggggccctactcatggccccttggaagtaggggcccttatttcctcacaagaggaagccagctgctcaagggcttcctcttgctgccagagcccactttacccccaacgtggcaggccagagtgtccaggacttggccccacaccggaagcagcccttgctgcctgactgatggggggtggtatgttcaacactccagccgcctttcccggcagaggcagcgtgcagaggtgtgttccacactggctcccagaggtgccctgaggacaaatgcagctcagctccctttctccccagtcccttaattagctactctctgtctcagtctccgccctccccaccgctctgcccccgctcccttttcccgtcctccccacgggtgtttcctggagtcacctcccacataagctacttgcacaagagtccttgtctcagagtcagcttctaggggtttccaccttaacataagacctatgcccagggtcatcacatgaagacctgagtcagccacttactggccagatggccacgggttacccactctgggccacgggttacccactctgggtcacaggttacccactctggccctcagtttctgtctggaaagaggtagccagtcacactaaagggggacttctttttgggtaggctattagagaggctgattcgatcattgattttttttttttaaacaaagcttatgtttttcctccgagtataaaagtaaaacatgacggttatgtaattttgaaaaacagaaaaataaatttaggcctggcacggtggcttactcctgtaatctcagcactttgggaggccgaggtgggcagatcacttgaggccaggagttcaagaccagcctggccaacatagagaaaccttgtctctattaaaaatacaaaaaattagcctagcgtcgtggggcgcacctgtaatcccagctactcgaggggctgaggcatgagaatcacttgaacctgggaggcagaggttgccgtgagctgagattgcaccactgcactccaacctgggagacagagaaaatctgtctcaacaaaaaaaaaagaaaaatcaatttaaaaagttaaaattacccaaattccaccactcaaggatattttctttgaaagtagagggcacagggtggccttgaaccctaacgtaccctgctttgggtctggctatgctgcaggactacggccctaagatttctgcaaatgtccagttgctgtgtgtagacgcagcttgaaataaactgcttgtacagcatgaggaggaaatgtgactgtcggacccttatgtaacagagtaggaaaccctgagtgtaaacagggtttcccttgtcaaggaacggaaattggtttccaaccggtgctttcaagggcagaccaggagctaggaaaagaaataggaagtcatagaatggaacagaggaaattaggaaatgaaaatctatagcctcagcatgaagtttatgaggtaattggactgtttttctcaaactgtgctggataaatctgggaagaaagattgatttctgatcctaagaagacctgcagtatagaccagcaggtcaggctcaagtgaggcctgattatatatttaataataacagaaaaacttttgcaaaggctgtatccattcggcgagctagagaccaggtagaaataccatatgaaggcaaccccaggaagtaataggaataatagggaaaatgggccaggtacagtgactcacctgtacctgtaattccagtactttgggaggttgaggtggcctcgcttgagcccagaagttcaagaccagcctgggcaatgtggtgaaaccctatctctacaaaaaaaaaaaaaaagtatccaggcatgtggtacgggcctatagtcccagctacttgggaggctgagttgggaggatcacttgagcccaggatgtagagactgcactgagccgtgatcgtgccactgcactccaacttcagcctgggtgacagagcaagaccctgtctcaaaaaaacccaaaaacttaaaatagggagattatactgtattatctgggtggtcccaatttaatcgcatgatcccctaaaacagaattttctccagctggagtcagacagatgtggcagaaagaaaagtcagggaggtttttaagtgtgagaaagacttgacctgtgaaggggccacatggaaagcatgagaaataatgcaggaagcttcttggagcaaagactggccctcagctcacaaccagcaaggaaggtgggacgccagccctacgaccacaaggaactaaatttgaccaacacctgaaggggatccatccccagagcttgcagtagggaacccagccctgtcaccaccttgagtgaggctttctggggccctgagcagatgactcagttgagccagagtttttgagagtggggctctgacctacagaactgtgagacaataaatgaaattgctttaagccactccatttgtagtaatgctatagcagcaataggaaacctacaccctgacatgtcaactaactactgcaagccaatgtgaatacgaccttcatggagtgtgtcccaggccatgggcagaagagggaatagccagctctgctagggaaagtgaagaaggcttctcagagaaggcatgctttgggtcctctagaggtggagcctgagatgagattccagtgcaagcaatggttttgggtgatgttcccaggaatcaacagtaagggagtgacagagtgagacagaaaaaaggaaagaagtcagtaaaagtgtgtgcggtggctcatgcccgtaatcccagcactttgggaggctgaggtgggcagatcatgaggtcaggagtttgagaccagcctggccaacacggcaaaacctcatctctactaaaaatacaaaaattagccgggcatggtggcgggcgcctgtaatcccagctactccggaggctgagtcgggagaatggcctgaacccggaaaggcagaggttgcagtgagccaagattgtgccattgcactccagactgggcgacaagagcaagacccccatctcaaaaaaaaaaaaaaaaaaagtgaatcaggctgggcatggtggctcacacctgtcatcccagaaccagaactttgggaggccaagggggactgataacttgagctcaggaattagagaccagcctgggcaacatgacaaaaccccgtctgtacaaaaaacacaaaaattagctgggagcggtggtgcatgcctgtagtcccagctacttgggaggctgaagtaggaggattgcttgagcctgggaagtcaagactgtggtgagccgggatcacgccactgcactccagcctgggtgacagggccagaccttgtttacaaaaaaaaaaaaaaaaaaacaccaaacttattaagcaagttaccattgtaggcagctggagctttatccttctcggggatgctgggaaactgtagattttgtctgggagggatggagggacggggatttatgcatctgcttccatcaatattggttgggagcctcttttggggccattaattccctagtactcagcccttcgatgtatgtatgcagagcaggcaccaacagtttcagaaaacactcaggcaaaaggttgcaggtgctagcacttggcagtctgattggtgtgcactgaaccagtgaggccaaggggccaagggaagggggagcaccggcagcatttgaagggagtgagggtttaccaggcagagaccagagcaggtgttgcaggcagacggaaatggttatgcacacagaggcccaaaaacaagcaaaagagttctgtgaagtggctagaggatttgaatctggagttggacaaacaggtttgaatcctgactctgactcctcactgcttattctccttaggcaagtcactccactgctctgagcatcagctatatgatgggaattatggtaggacctgcctcattgtgctgtcacaaggattaaattattttattttattttattttattttattttattttattttattttattttattttttgagatagagtctcgctctgtggcccaggctggagcgcagtggtgtgatctccactcactgcaacctctgcctcctgggttcaagcgattttcctgccttagcctcccaagtaactgtgattacaggcgcgcgccaccaccctgcctggctaagttttgtatttttagtagagatggagtttcaccatgttggccaggctacactcgaactcttgacctcaggtgatccacccaccttggcctcccaaagtgctgggattacatgcatgagccaccatgcccagccacaggattaaattaggttatgctttaaaagagtatggcacctggtcagccctcaataatgataagcaatacttctgttgttgtcccaccagtgggtgaatgttggctagttggctatgcccacacaaagagtgcatggagacaaggggtccagtggagtagtaggccagaaaggtgggtagcagcttcgaggtaccctgtgaggtattttcaattgtaggctcacccagactgaaccaagcacagctcacacttgtaatctcagtgctttgggaggccgagggaagaacacttgagaggccaggggttcaagaccagcctgggcaacaaggaaagaccccatttctacaaaataataataatttaaaaaaaaataggcacagtagtgagtgtctgtagtcctagctactcaagaggctgaggcaggaggattgcttgagcccaggagttcgaggctgtagggagctatgattgtaccactgtactccagcctgggtgacagagcaagactccattaaaaaaaaagtgagaggccgggcacggtgactcctgcctgtaatccagcttgaccaacatggagaaaccctgtctctagtaaaaatacaaaattagccaggcatagtgacacatgcctgtaatcccagctactcaggaggctgaggcaggagaatcgcttgaacctgggagacggaggttgcagtgagccaagatcgcaccattgcactccagcctttttttgcacacaaaaaaggtgggcgggagggggaggcttatttttagggaaagtgaaataacaattcaggacttttgagcctgaatctgtggatcccaacgagtctgaataaaatttaggaggtccacaaacttggctaggaaaagaatcattcctattttcactaacttccaactgaaattgaccttccccttccatgatgaatgtgggcaacaaaccacaatgatattagcaggaattgtgattttgtcacaagtaaaaaaaaaaacaaacaaaaaagcccccaggtatttccagattgcagacatcttaaagtatcctttataccctttactacttcaaaataatgttttttagacctgtttttagatttagatttttgtttgtttgtttgtttgtttgttttgagacagagtctcactctattacccaggctggagtacagtggtgtaatctcggctcactgcaaactccgcctcctgggctcaagtgattttaccacctcagccacccaagtagctgggactacagatctgtgccaccactcctggctgatttttgtattttttatttatttatttttatttttttgtagaaacggggtttcaccatgttcaccatcctggtctcgaactcctgacctcaggtgatccacccgtctcagcctcccaaagtgctgggattacaggcatgagccactgcgcccagcccgcaccaggctttttaaaacctcccacagacagacatattctatgtttttaccccttcttgctgtgatcttgttgtgaccaatgtaattacaagggtggaagggccatagaggccatatcccagttaaagaggatgtctctttcccattaggattggaaagggccaggccctgcttaggttgtgcatctgttcttggatgaatcacgacggatgctgatggatgactgggtcatgttcccagctttgggggcgaggatatggccccgtcagcctcatcaaatcatgtggagtctgttagtttctattgctgctgtaacaatttaccacaaatttaggggcttgaagtcgcacacattgattacctcccagttctagaggtcacaagtctaaaatgggaatcactgggctaaaatcaaggtcatggcttgactgccttcctttctggaggctctaagagagaatctgtgtccttgccttttccactttctagggaccacctacatctcctggcttgtgccctattcctccatcctcaacaccagcaacctccttctcatgctcttatttttctggttctcatttttctgtctccctcttctacttataaggacttttgtgtttatattgggtgcactggataatccaggataatctccccattccaagtcagctgattagaatagcaatcttaattccttctgcaaccttaattccccttttccatgtaatctaacacatttacaagttccaggggctgtgacatgaatatgtttgagaggctatttttccgcatactatatagaatcaacgcaatcacattgaagtggagaaaaaagtggttccccagaggaagggatgttgcacaggccaataagcatctgtcttctaccacaaagatttaagggggcctgtgcaacgctcttgctgcacttcatttatacttttattaagcatttgtagcaagcgtttgtgacgtctggtgtcacatctctgcaactcacctgatttcagtgcacctttgatagttctgtgcactttgccagtattatttctcaagcatatatggaaacacctctctgccttctctaagacagtagaagccaaattcaggtgcaacctgaaagtatcagggaattaacaacctgggagctaccctcaccccacatggaatgggagcagtgcttagatgctgcagcctccatctgctggcggagttctcctcctcctcctcctcctcctcctcctcctccttcttcttttttctccttcgtctccctctccttcttcttcatggagtctccctctgtcacccaggctgcagtgcagtggcgtgatctctgctcactgcaacctccatctcccaagtcctatcaattctcctgcctcagcctcccaaatagctgggactacaggggtatgccaccgtaccagttaatttttgtatttttagtagagatgggatttcaccatgttggccaggctggtcttgaactcctgacctcaagtgatccgcctgcctcagcctcccagagtgctgggattacaggtgtgagccaccgcgcctggcctaagtggagcacttcttgatgtgctttctttatggttccttcgaaggtcccagcaggattcacacacctcattcagacaattcgtgttggcttttccccctttttggtttcattctccctattccctactcctgcttcctggcatcacctcccaaataaactacctggatccacgcccttctctcagattttgctcttgggggaaaccctattagatagcacgtattcctgatgtttggcagagagttactgatgtggctgtctgcgtggtggagccctgccagtacaaaccagtgcagtttgtttagaggcatctgccctgatgggctagtgtccattccattggctgatgctcacgccacacaagtcatctggcactactgaggtccatcagcacaataacatgaatcactgttcctgacgcacacttcttggctgtttatgaggttcttgttcaagacatatggataaggagtatgaataccataagatgcaatccttaaggtcacgtgctaaaaggtctgtgtacctaaaatggggaggaaaggttgtctgaggtcatcttaaaaaaaaaaaagttcaggctgagagcagggttgtttatttgagttctggcaatcactctgggaatttatttacatgccaagggaaacatgaggacagtggactctagaaaccttgtgccccaagctgcaaaagacagcaggcttgggcccagagagacaccaagaccttgccaaagactcaacgaatacctgatggccgagcacagtggctcacgcctgtaatcccagctctttgggaggccgaggcgagtagatcatctgaggttggaagtttgagaccagcctaaccaacatggtgaaaccctgtctttaataaaaatacaaaaattagctgggtgtgttggtgcacgcctgtaattccagctactcaggaggctgaggcctgagaatcacctgaacccaggaggcagaggttgcagtgagctgagattgcaccactgcactccagcctgggtgacagaatgagacttggcctcaaaaaataaacaacaaaaaaccccacaaatgcctgatgacttttgatgggtgtcaagtgttctttgtcagctgatggggacatcatttaatctatgtactagatggagatcaggtagaaggcatgaagtctcatgacttttatcacatctctaggtcatacagcactcccctgccccactgcctgaccccctgcagcatggggccattctcttcacctgccttctcagaatctcagttggtcgccttggagcacagaggctgtccatcctcggggggagcaccaccagcagatggcatagattttccaccacccaccaaaactgcagcgtgactttgcaacgggacaggaaaaaagaatgaataatcccaaggccctgcttttttttctcaaaagtactttcaaaggagatttttggccgggcatggtggctcatgcctttttaatctcagcactttgggaggccaaggcaggtggatcacctgaggtcaggagttcaagaacagcctagccaacatggtgaaaccctgtctctactaaaaatacaaaaaattagctgggcatggtgtcacatgcctgtactcccagctactagggaggctgaggcaagagaattgcttgaacccaggagacgcaggttgcagtgagccgagatcatgccattgcactccagcctgggcgacaagagcaaaactccatctcaaaaaaaaaaaaaaaaaggtgggcgggggggtttgttttttgtttttttcattttaaatttaccttttatatttttgtacatattgttaggggtcagccacacttaatgatcttggaagagcaaagcagtcttcagagcgttctctgtcctacttccgattttacttgtggcatgaccttgttccttaaaatctcaaaggaaaaaaccttataaaaagaaaagcagcctgggcgtggtggctcacgcctgtaatcccagcactttgggaggccaaggtgggcggatcacgaggtccggagatcgagaccatcctggctaacacagagaaaccccgtctctactaaaaatacaaaaattagctggatgtagtggcatgtgcctgtaatcccagctacttgggaggctgaggcaggagaattgcttgaacaagggaggcagaggttgcagtgagctgagattgtgccactgcactccagcctggtgacagagcgggactccatctcaaaaaaaaaaaaaaaaaaaaaagaaaagaaaagcaaaaggacaactcttattctgagcatctattaagtttttttgtgtatgtattaagctgtactatgagtagttggtttgtacgaaatggttaaataggccaaatacaaaagatttctctctctctctctctctttttttagagacacggtctcgctggactggtgcagtggtgcaatcagtgttcattgtaaccttgaccttcctggctcaagcagttttccctccttagcctcccgagtacctgggaccacaggtgtacaccattatgcacaactaatttttaaaatttttgtagagacagggggtctcactgttttgttcaggctgatcttgaacacctaagctcaagtgattctcctgtcttggcctcccaaagtgctgggattacaggtgtgagctgctgtgtctggctgggtttctttcttttttttttttttttcctctttttttgtctataaagttgctgtttgtttataaatgttttcacttgtttgatgtatgtgtgaaacaatgttcaacaattaaccagaattttattttgctgatttactctttaacaacaaaagatgtaataataaataataattacagcacacttactatgtaccaggcatcattctaggccctttatagatactgtttcatctgtcctcataacaatttcatgatgtagatagatgaaaaacagaggcaagaaaggtcaagtaccctgccgaaagtcacccagtcaagaggcatctctataaccagttgagaaatcatgaccttatatagaagcatctcaaaactagcccaatgctatcagagacccctgggttctaagagccaaaatgacagcctcttctcttttcattgtgattttctaaaatcacagatgtttaatctttctgtagctctgtttttgaaacagtttttgactctgggtttaaggagaaaggtggcttatgcttgtaatcccagcatttggaaggttgaggtgggtggatcacttgagcccaggagtttgagatcagcctgggcaacatggtgagaccccgtctctaccaaaaatacaaaaaaattaaccaggcatggtggcatgcacctatagttccagctactcgggaggctgaggtaggaggctcacctgagccttggaaggttaaggctgcagtgaaccacgatcatgccattatactccagcctgggcgatagagtgagaacttgtctaaaaaaaaaagggagagagtgctgttttctctactcttttctttctttctctctttctttttctctttctttctttctttcatctttctttttttttgttttgttttctttgagatggagtcttgctctgtcatccaggctggagtgcagtggcacaatttcagcccactgcaaccactgcctcccaggttcaagtgattctcctgcctcagactcccaagtagttgggattacaggtgcctgccaccacgcctggctaattttttgtatttttaatggagacagagttccaccatgttggccagactggtctcaaacacctgaccttaagtgatccacctcccccaacctcccaaaatgctgggattatgggcgtgacccaccaggcctggccttctctacccttttcaatgccaggtaaattccttgcactataggatttgctcacttgttctcattctattgttttcttctcctctttttgacttaactggcctgtcttcatttctttgttatgcctgtatctcttattcttcgagtattttatttatttatgaaattattatttttgagacacagtctcatttctgtcacccaggctgcagtgcagtggcacaatcacggctcactgcagcctcaacctcccaggctcaagcaatcctcccatctcagtctcctgagtagctgggtatacaggtgctcacaaccatgcctggctaattttgtattttttgtagagaccaggtctcactatgctgctcaggctggtctcgaactcctggactcaaatgatcctcctgcctcggcctctcaaagtgctgggattacaggcgtgagccactgtgctccgcctgtaagagtattttaggctgggcacggtggctcacatctgtaatctcagtacttcgggaggccaaggcaggcggatcacgatgtcaggtgttcgagaccagcctggccaacatggtgaaaccctgtatctactaaaaatacaaaaattagccaggtgtggtggtgtgtgcctgtaatcccagctactcaggaggctgaggcaggagaattgcttgaacccggtaggcggaggttgcagtgagccaagatcatgccactgcactccagcctgggtgacaaagcaagactccatcttgagaaaaaaaaaaagagtattttagagagtattttacctgtactgaatgtgattttactgtgaaggcaggaatgccatgaagtggacacaaatgcaatgccgtttggttgttagagtgcagctattttgtgcaggttgggagctgcacaaaggtgtatcattatgattcttcagcatctctgtaggagcacaagaacacttgtcaaattgcatgataatgactaagcatgtgagggacgaagtcaccaaaaacagggctggctatgtgagagtcctaaagaaggctcaggtaggctgttgccagtttacagctttacctttatttatattccttttttttttttttggcagaatctcactctgttgcccaggctggagtgcagtggcacaatctcggctcactgcaatctctgcctcccaggttcaagcgattctcgtgcctcagcctcccagcacctgggactacaagtgtgcatcaccacgcccggctaattttttgtattttagtagagatggggtttcaccatgttggccaggctggtctcgatgcacccggctacctttatttgtattcaacaagtgatcactagcaggctctgtgctgaacatgcagttatacctggaatcattcaacagtgaaaacctatgaactttatttactcatgtattaatgtatacagtcaccctgtcatgccgttcaataagcacaaatatcttccgtgcattcagaattttctggaatttggaaaaacaaagataaataaggctgaggacttgccctgaggaatttacagcctaaaaaggaagacataaatgaacaggtagctgatgcaacagttcagaaacatcaagagcctgaatcttctacaagacccaaggaggataaaaatcaaacttttcgattataatatttaagataactttaagttctcccccccctccccctccccctccctctccctccggtctccctctccctctctttccacggtctccctctgatgcccagccgaggctggactgtactgctgccatctcggctcactgcaacctccctgcctgattctcccgcctcagcctgccgagtgcctgcgattgcaggcgcgcgccgctacgcctgactggttttcgtatttttttggtggggacggggtttcgctgtgttggccgggctggtctccagctcctaaccgcgagtgatccgccagcctcggcctcccgaggtgccgggattgcagacggagtctcgttcactcagtgctcaatggtgcccaggctggagtgcagtggcgtgatctcggctcgctacaacctgcacctcccagccgcctgccttggcctcccaaagtgccgagattgcagcctctgcccggccgccaccccgtctgggaagtgaggagcgtctctgcctggccgcccatcatctgggatgtgaggagcccctctgcctggctgcccagtctgggaagtgaggagcgcctcttcccggccgccatcccatctaggaagtgaggagcgtctctgcccagccgcccattgtctgagatgtggggagcgcctctgccccgccgccccatctgggatgtgaggagcacctctgcccggccgcgaccccgtctgggaggtgaggaccgtctctgcctggccgccccgtctgagaagtgaggagcccctccgcccggcagccgccccgtccgggagggaggtggggggtcagccccaggcccggccagccgccccgtacgggaggtgaggggcgcctctgcccggccgcccctactgggaagtgaggagcccctctgcccggccgccaccccgtctgggaggtgtacccaacagctcattgagaacgggccatgatgacaatggcggttttgtggaatagaaaagggggaaaggtggggaaaagattgagaaatcggatggttgctgtgtctgtgtagaaagaagtagacatgggagacttttcattttgttctgtactaagaaaaattcttctgccttgggatcctgttgatctgtgaccttacccccaaccccgtgctctctgaaacatgtgctgtgtccactcagggttaaatggattaagggtggtgcaagatgtgctttgttaaacagatgcttgaaggcagcatgctcgttaagagtcataaccactccctaatctcaaatacccagggacacaaacactgcggaaggccgcagggtcctctgcctaggaaaaccagagacctttgttcacttgtttatctgctgaccttccctccactattgtcctgtgaccctgccaaatccccctctgcgagaaacacccaagaatgatcaattaaaaaaaaaaaaatcaaacttttcattccctctttacagtgttgatgatctctatctgaaagtcttgagtgaatgcctttctggttaatcagtcaccattggctgagggcaggggctcacacctgtaatcccatcactttgggagaccgaggtaggagtttgagaccagcctgggcaacattgcaagaccctgtctctattttattttatttatttattttttttgagatggagttttgctctggttgcccaggctggagtggaatggtgtgattttggctcaccacaacctccgcctcccaggtttaagtgattctcctgcctcagcctcctgagtagctgggattacaggcatgtgccatcatgcctggctaattttgtatttttagtagagatggggtttctccatgttggtcaggctggtctcgaactcccgacctcaggtgatccacctgcctcatcgtcccaaagtgctaggattatagccgtgattaaaattatttttttaaaaaaggctgggtgcagtggcacacacctgtaatcccagtactttgggaggcccaggtgggaggatcacttgaggtcaggagtttgagatcagccggggtaacacaacgagactcctgtctctaccaaaaaaaaaaaaaaaaaaaaaaaacagaatcctaacaacaattaaaaaaaaaagtaaccatcctttctttcttaaatgaagtaatagcccagttgcctttcccccttgtatctagtgctatttagaaagaaatgggaaacaaagagggagagaaagagggagaaagcctaatataattgcacactgacctgcaaggtaattgagatgctttctccacactccaagatttttccaaggataaaaaaactttcattgttatattcgtggtaagtttatatttacatcagtgtaatcactagcttaaagtgtctggtggattttcctgctggcagctttggtgagtgaggaactttatgctccaacaatggaaagcccaagtctagctttccttgcagagctaaaagaatgggttccgggaatgtcacagcactgacgttttcattagtctggaaacttcatcactggagttggtggaagtaagatttaagtctcagatgtgacttctacagtgaaaataccaaagagccttcctatgaataattaaatggctgtactgagccagagcaacagcaaaagataaaaagcacccgtttgtcatcagccggacttaaaggggctgagtccggtttttattcaacctgcttcaagtgcagctgtgtcagccttcactcttttattggcaggaagggaagcttttggtatcagatgttcttccacaggagaactgcttgtttgcttagtgaaactgcaataataaaattaattaaaagctttttatcatttagctatagcacagaggaagtataaatggacattcaaaatggcaagatgagttcaaggccacgtagcaaatatacctatagtcagtgtaaggattaaaacaattaagatgcttttgtcttttaatttttttttttaagagagggtcctgctttgttgctcaggctggagtatagtggtgcaatcatgactcatttcagattcaaactcctgttatcgagggatcctcccacctcagcctcccaagtagctgggattacaggtgcacaccaccatgccctgctaatttttgtatttttttaatgcaatggggtctcactatgttccccaggctggtcccaaacccctcggctcaagtgctcttcccacctcaacctcccaaagtgctgggattacagatgtgagactgtgcctgacctaaaattcttaaagtgcttagtgctggctcacaggaaatattactatgcggtagcaattcttattcctgaccagttttctgtattagtttcctattgctgctgtgacaaattaccacaagcttagtgacttaaaacaacacaaatttggccaggtgcagtggctcatgcctgtaatcccagcactttgggaggctgaggcaggcagatcacaaggtcaggagatcaagaccatcctggccaacatggtgaaaccttgtctctactaaaaatacaaaaattagctgggcatagtgatgcctgcctgtagttccaccttcttgggaggctgaggcaggaggattgcttgaaccaggaggcggaggttgcagtgagccgagatcgtgccactgtactccagcctgggcaacagagtgagactccatctcacacacacacacacacacacacacacacacacacaaacaacaaaaaactacaaatttatcttatagctctggagtcagatatttcaaatgggtcagcagggctgcattcctactggaggctctagtggaaaatctgtttccttgccttttgcagcttctagaggccacctgtgttccttggttcatagccccacatcactctgacctctgtttccatcatcacgtctccttttctgactctgatcctcctgcttggctcctataaggacccatgtgatgacattgtacccacctggataattcagaataatcttcccatctcaaatctttaatttgatcacatcggcagtcacttttgtcctggtaaggtaatgcccacagattctgaggattagggtgtggtcttgtttgggaaacaggacattactcagtttaccacatcttctttcaatttcactgctctaggctgggcacagtggctcacgcctgtaatcccaacactttgggaggctgaggcgggcagattgcttgagtccaggggttcaagactagcctgggcaacatggtgtgatctcatctcacagaaaaatataaaaattagctggacatagtggagtgcacctgtgtcccagctactctggaggctggagtgggagaattgcttgagcccagaaggtcgaggctgcagtgaactgagattgtgccactacactccagcctgggtgacacagaccctgtctcaaaaaaaaaaaaaaaaaaaaagaaaagaaaatttctgctctattttggctgaaatgatagcagcttccattgactagtgctagccctatgagggggtttagaaatgacagaaaatgcactgggtgtagcagatgcagaccgcactgttatccttgcccttattatttctgggctccctggccagattttcaactgcccacagttataactatttgcctgagggccttctgtggctgccagagcttaacttgcccctgggaggcagatgagaagtgtcaaggaattagtcctcctctctgccccaagcagctgttaatcgatggctgataacgacccaactcccctgccctttgctgagaaaactcctaggtgtgtgttatacacagtcttctagagttccccagtggaggctgggagcagtggctcatgcctgtaaccccagcactttggaaggctgaggcgggaggatcgcttaagcccaggagttcgagaccagcctgggcaacatggtgaggctcccatctctattaaacaaacaagcaaacgaacaaaaacacaaaattatagagtgctcccgtggtccgcggtgttgacttgcttggtaatatgccctctcctctgtggtctgccttccctttctgatcccattttctctactcccctagtaatgttttctggatcatctggtaaataaactacttacatgtgaatccttgcctcagagtctgcttctaggggaattcaaattagcatatcgaagcaatcaagtaagttgtcagtgtcccatggctactaagtgatagaggaaggttttgaacccaggtctgccgcagagctcatgttctgtaaccgctcccagtcacttgtctttttttaaaaaaaatttcccttttctttttcacctgctgtcaaacccagtcacttcttttagctggctttgcggctcattgtacctaagggagactgtggacccagtgtgtaataaagctaaaaggtgcctattttcaagttcctgatttgaaggaagagtgtagaccctgatctggtggggatgggggtgctgtaactctcaggctgcggccgagtgtgggagcgccctgggcatccttgggcagcacacacagactcatgggtcagatgggagtggctggatttccactatttttctgcgttcaaattctgcggcaggacatagtaacagaaaactggcttaaaaagtatgcgcatgcatgtcctttatcaatacgtaatgtgcttacggtagtacacatcaggacacagacccaggacccaggcaactttcctggaatgtggctctactagaagtagctttcctagaatatggcttttagcccacaaactgcctgcactaccgaagaagaaggaaaagaaataggtggtctgtctctgctcccattttgtttgtttgttactcttttttacactctagggttgatattgtcataattttattttattttattattttttttttgagacggagttttgctcttgttgcccaggctagagtgcaatggcatgatcttggctcactgcaacctccacctcccaggttcaagcgattctcctgcctcagcctcccaagttgttgggattacaagtgccctccaccacgcccggctaattttttgtatttttagttgagatggtgtttctccatgttggccaggctggtctcgaactcctgacctcaggtgatccaccagcctccacctcccaaagtgctgggataacaggcgtgagccaccgcacctgaccgatattgtcataattttaaatctgatttctgatttcactaggacaaaaactcacaggagaggcaaggctgatttggctagtctttctacccgtaagagttctgtgaagctttttttttttttttttttgagacagagtctaactctttccaccaaggctggagtgcagtggtgtgaacatggttcactgcagcctcaaccttccaggcttaagtactcctcccacctcagcctccctgggaccataggtatgtggaaccacacatggctaagttggttttttttggtttgtttgttttgtttgtttttctatattttttggagagacaggggttcaccatgttggccagtctggtcttgaactcctgggctcaagcgatcttcctgccttggcctcccaaagtgctgggattacaggtgtgagccaccaccttggtttgttttttaagagacagtctcactctgtcacccaggctggagtgcagtgacctaatcatagctcactgcagccttgaattcctggacccagttatttttgttttctttttgtagagatgggtttctctttatgttgccaccagactggtcttgaactcctggtgtcaagcaatcctcctgcctcagcctccaaaagtgctgcgattacaggcatgagccaccatacccagtaaaattctttaccttgtgaggtttatgtgtttattttgtgttcagacactttagtctttggagaaaaaaaccctgaaaaacaaagagttgcattagcattagaatatgagaaaaagaagggtcacatttagaatattgcaaggctatcaattcacagaaggtatacctggcacatccctctgagtattggatgccacttggtttgaatcctttacttacgggataaaaccgtaggtgttctacctaatctctatcagttaccttatcagtgacacaggtgatgttacagttgttggctgcatccctactggaaagctggaagaatggtccatgctggtacattattcgtgggttaatctaactctacagctgcaccatcccaggaagcctaaaaaatgtgaaggtttaggaaattgaaacgttattgactttttactccttggcatcttgtcatctctcagtcctggctcttttattgttggtttataatccatgggctctgaatctaccacaataactttatgttatctattacatatggtattatataatagcaaatattatattatattaccaatatcgtgtggttggctgcatagcatttattgcaaaatcatgatttgggcacattttactcaaaatatgtttgaatcaattaatttttttaaatctatttttaaagacagggtctctctctgccacccaggttggagtatagtggcatgatcatagctcactgcatccttgaactcttgggctcaagtgattatcccatctcagcctcccaagtagttaggactacaagcgtgcaccaccacacctggctaatttattattattatgctttgtaaagatggagtctcactgtgttgcccaggctggtctccagctcctgggctcaagtgattctcctgcctcagcctcccaaagtgctgggattataggcatgagccgctgtgcccacctgaatcaatttactgattttgttttgttttgtttttgagaccgagtctcactctgtttccagactggggtgcagtggcgtgatctcggctcactgcaacctccatctcctggattcaagctattctcgtgcctcagcctcctgagtagctgggactacaggcgtgagtcaccgtgcccaggtaatttttgtatttttagtagagatagggtttcaccatgttggccaggctggtctcgaactcctgacctcaggtgatctgccctcctcagcctcccgaagtgctgggattacaggcgtgagccaccgcacccagactttgaactattgttctaaaaaaaaatagattttaccttgaccaaagagtttgggactaaatattttccccactagaaacatgttgaagtacttatgtgggaaaagggaacagcacaggaaatgttgctgagcaaatctctttaccccctcttttcagactgcagtttcacggggattcctacgcctaagtgctaacacgtgtgcctagaaaaacagaggtggcatggatgttagaaggccgtgtgcaagtggatggcatccaatccatagagtgcttagagaacagtggagaaaagatgaagggacaaagagattgtgaagccagatatcctaaggctgttgagagaagctcaagggggattgggagttggagacttcatccctcatgtggctgagctgcaagagtagctcactcctttcttgatgacagttactccaagtcagataatattttgcctggcctccgctcagtaaattgaaaatgtgcagccatttgaaactacaccatggcagtggctcatacctgtaatcctagcactttgggaggctgaggtgtgcagattgcttgagcccaggactttgagaccagactgggttacatagtgaaaacccatctctacaaaaataaaaaataaaaaaaattatctggatatggtggccaatacctatacttccagctacttgggaggctgaggtgggaggatcatccgagcccaggagattgaggctgcagtgaactgagattgctccactgtactccagcttgggctacaaagtgagactctgtctccaaaaacaaaacaaaacaaaaaacaaaaacaaaacaaaacaaaacaaaagaactacaccatgggccaggcatggtggcttgcacctgtaatcttagcactttgagaggccaaggtgggaggattgctttacgccaagagttcgagacctgcctgggcagtatagtgagaccccccatctctaataataataataataataataataataataataataataataaaaataataaaaagttaaactactctaggtgcagattttgggggcacaaggatttgctgtgcacaagctgggacatagctgcctgtcctgaaaacggaggggtcttgtccactttcccaccatacgctgtggtcatccttttgacagtccactccattgatggaacagataaatcagaaggcctgctggaaggaaaccaattgttcaactctgcttttgcaaaagaattcaagtcatttaaggttagccttaaaatagaacaccccagtaatgtgatcaacatggaacaaaagcttcaggagagacaggaggtcagagagaaaatgatacctctggtcggcaaccctgcagagacttccaggaataagcaggtagcaggctcagaaatgccactgatatctgatgtgccagcagtttccaaagaccctggatgttccttgattctttactacttttttgtgtcaccaaacactgactcttacataagacaatttctgaacagaaattgaatataatctcattaattagataggggagatgaattgcaatgtaaacttagtgaagaattggtacctagacaaaagaagggagtgtgagctcaccaagggtatccacagtcaaattactttgtctgttggggtgggctgcttaattggtgttttattcttttgtttattattgatggttgtgaacagggtctcactctttatcttttcttcttccaagacttgtgttaaatatatactagaccttctcacactgtcttccaggtcttctctcattctgatctgaatttatttttattagtcttacgtgtcttttatcccctaatttactcataatggatattaaaagttgaaacaagttaaagacatgtcccatacttctagaaatatgcttaatgtaatcaaacattgaattttctccttgatttttaggtattctacccttacagctacaaaaacacttctactcttagaaaagaagaagaatgccgggcgtggtggcttacacctgtaatcccagcaatttgggaggccaaggcaggaggatggtttgagcccaggagttcaagaccaggctgggcaacatacctactaagacctcatctctaaaaaattgcatggcatgaacccaggaggcggagcttgcagtgagccgagatcgtgccatggcactccagcctgggcgacagagcaagactccatctcaaaaaaaaaataaaaaattacatggccgcgcacagtggctcacacctgtaatcccagcactttgggagtccgaggtgggtggatcacgaggtcaggagatcgagaccatcctggccaacatggtgaaaccctgtctctactaaaaatacaaaaattagctgggcatggtggcacgcacctgtaatcccagctacttggtaggctgaggcaggagaatcacttgaacctgagaggcagaggttgcagtaagctaagatcacgccactacactccagcctgggcgacagagtgagactccatctcaaaaaatacatacatacatatatacatacatacatgcatgcataaaataactttgttgttgtaaatctgaaatcctctaacctctaatcttcatcatgacattgaaacaattgtctccctttatattttaattctgttaagattccatgtgacattattattttgtttttgtttgtttgagatggagtttcactctcttgcccaggctggagtgcaacagtgcgttctgggctcattgcaacctctgcctcccgggttccagcaattcttgtgcctcagactcccagatagctggaattataggtacgtgccaccatgcccagctaatttttgtatttttagtaaagacggagtttcaccatgttggccaatctggtcttgaactcctgacctcaagtgatccttctgccttggcatccgaaagttctgggattacaggcatgagccactgcaccccgcctatttttgttttgtatactgaatgcttatttaaaattactcacatatatagcaattatttgctctttattccttcttgcacctctgattttcattttggatcattttcattctcccgaaataatgcctgttagattttcctttaatgcatgtttgctggtggttgaagtcttcttgttcagtttgtctaaaatgtttttatgttgccttttacccccaacttgtacttgtaattgcctttgttctggaaggatacttttgtcgtcagtaggattctacattggcagttattttctttcagccaactgaagatataattccattctcttctagctcctgtaaataagtcttttgaaaggaatctctttttcctgtgaatactttaaaattgttctctttggtttctgaagtgtcttcataacatatctaggcgttaatttaaaaaaatttatactctttgggatttgttaggcttcatgaatctgtgggttgatgtccttcattagttccaagaattcttaggtatatattttttcaaatgttgcttctgcctcattctttgtcttttcttcttctaagactcgggttaaatatatactagaccttcttccattatcctctagatctcctctcaagtcttgtgtgctttatgtctttttgtctttccgcgctatatcctggatagtttcttctgacctatcttctactttatgaattatcctttcagttgtatcaaatatgtttattccatctgctatggactgaattgtgcacccctatattcatatgttgaagccctaacccacaatatgactgtgtttggagacaggtcctatataaggaggtaattaagattaacttcagttataagggtgggtacctgttctgataggattcatgcacttaaagcagagacaccagaaagctcactttctctctctctgccatgcagagagaaggtggctatttgcagcctcattagaaaccctagcagaaccttgatcttggactttccagcctctagaatggagtctccctcagaattattgtctgataaaataatttatgtttttaaaccacacaatcagctgggtgcagtggctcatgcctgtaatcccagcactttgggaggccaaggtgaatggatcacttgagtccagtaatttgacaccagcctggacaatatagcaaaacctcatctctacaagaaatgacaacaacaacaacaaaattagccgggagtggtggcacacacctgtaataccagccacttgggaggctgaggcacaagaatcatttgaacctaggaggcagaggttgcagtgagacacgatcaggccactgcactccagtctgggtgacagagtgagactcaaaagaaaaagtaaaatgttttttaaaaatgaaagaataggcatttaaacttttacccgggaaatttctttttctttctttttttctttttctttttctttttttttttttttttttttttttttttttttttttgaggcagggtcttgctctgccccgaggttggagtgcagtgatgtgattatggctccctgcagcctcaacttcccagcctcaagtcatcttcccacctcagctcctgagtagctggaactacaggcacataccacatgcccagctaacttttttattttttgtatagatgggtcttactatattgcccaggctggtctcgagttctttggccgcaagagatcctcccacctcagcctcccaaggtactgagattacaggtgtgagccactgtgcctggccagaactctcactatacagtcctatccatttacagccctttgcctacatgtccttagatctgtgtttcccagattttcccataaattccctgcaaccttccttttgaccttgagtgctctacacagtcatcccatttctagttcatctataggaatagtggagttgacagcaaataatgtttttcaactgcttgaatattagagtccttctcccttgtacagcaatatatgtctatgatgaagcttagtaaaatagctgtagaacgaattcggagataaaattacaggaactctataacagcacatgtggcttttctctgtctctgaatctacctcttctggaaatgaacaggagtaacttaggtgagctcacaaacatagctactaccatgcagtatgtacccttacaccacccctgcccccactcccactgtagtttcctgggctttagtctgttctaagttctttgatgcttgtgaagctacttctgctgactttgttgacactgacattgttaccatggttaccagggaagtcagacaatatactgaaggggagttgcttcctgccctaaccaggacaaagacactataacctttgaggttgctggtgtatccgtgtcctcagtgaagaattcatgtatgagctgaggttgccaaagaagcagggaagctttcttccccctcctttgcctcacactctgttacactgagttagaagacatttacctgtgaaaaccacaatgacacactgttctacctaagaggctggcaagatcaaaatgactgataaactgtatcagaaagggcgtggaaaaacagatattgttggtggaatgtaaatggacataatctctttaggagaacaatttgggcatccataccgtttgatggagcaactttatccctaatttatagcgcaacgtgtgcaaaacaagcacatggatagaatagtcaatgtggcagcatctgtaagtcgaagattagaaacaatgggacagcacactcagtgtggcctttccatgtgccattggctccactcccagttcacctgcagccagggaggaaggttctgtatgtgctgacaaggctccccacctcaagccacctgcagcaccctcaagggaaatcttcaaccagtgataatgaaagatgacgcatgtcttagtctactcaggctgccataacaaaatactaaacactatgtggcttaaacaacacaattttatttgctcacagttcttgattctagaagtccaagatcaagattctggctgatctggtttctgatgaaggctttcttcctggcttgcaggaaaggccatgtgaggaggtcttagtgagaaggccttagtgcatgcacatgggaagagagagcaagctgtccagtgtcttttctcataagggcactaatcctatcagatcagggccccacccttatgatctcagataaccttatgcttgacccttgaacaacacaggggctagggacatcaacccctcacacagttgaaaactcacatataacttttgattcctcaaaaacttaactacctcaaggaattaggacatggaaaaataaaactaactactaatagaccattgtttgttgaccagaagccttatagatggccttacagataacataaacagttggtgtgtgttatatgtattatatactgtattcttacaataaagtaagctagataaagaaaaccataaagaagagaaagtatatttactattcattaagtggaagcagatcatcataaaggtcttcattcttgtctgagtgttgagtaggctgaggaggtggaggaggaagaggagggattggtcttgctgtctcaggggttgcggaggtgaaggaggtagaaggggaagcaggagaggcacacatggtgttaatttttattggaaacattccacatataacgggacccaagtaattcaaaccagtgttgttcaagggccaactgtaattacaaaaggtctaatctctaaatattaatacatcctcactggggtttaggttcctaatatatacatttagttgggggatacatagacattcagtttataactgcatgtaaataccacagctttccagtcttttggtgtgatgtttctgaggcttcttctacccattctctcagaggggccccattgagctagggctgtcctaagtggggacttatttattaatctacccttttgtgagtctcctcccttccctctcactgggcttcctgggatctccttccaaataaatgacctgtacccaagtccttgtctaagggtcttttttttttgggagaatgggacaaatgtttcaaatcaccagtcatttgaatctaaagttattcctacaagagctgctatggtctgaatgtttgtgttgctccctgctctcccagtttccgtgttgaaattgaatcaccaatatgatgctattaggaagtagagcatttgggaggtgagtagatcatgagagtagaaccctcatgaataggattagatcttttatttttatttttattttcagacagggtctcacactgccacccagcaggctggagcacactggcgtgatctcagctcactgcaacttccgcctcctgggctcaagcaatcctcctgcttcagcctcttgagtagctgggtctacaggtacacacaccacacccagctaatttttgtattttttgtcgagacagggttttgccatgttgcccaggctggtctcaagctcctgagctcaagcaaatctgcctgcctcagtctcccaaagtgctgagattacaggcgtgagccaccgcgcctagcctggatctcttataaaagagatctcagagagttagcacatctgttccaccatgtgaggacacagctataaggtgccatctatgaatcagggcctcaccagacactgaatctgccagcaccttgatcttggacttcacagcctctggagctttgaaaaataaatatctgtagtttataagctacccagattattatatgttgttatagcagcctaagcagactaagaaggtattcagtcctgcaggttgtcccatattcctagtactgtggttgaaattgttatatattggttcctgtcaaacgccagctcatacagcagcgtgggagagactggaattgaagagactctggaaattggtctgccctgaacagggaatgaggcaggaaacaggaagacagacccagtggcaagtaccaagagcccagtctagaggaaagaagaccatatccaccgggcacatcggggcaaaagcagggctcccgtctcccaccaaacctagaaggtcctcatagatgagtggaacatccatctactcttgaagaaacgaggcagaatttgaaactttgaaacacattctaacaaattgtgattgaaaagttagatttagagaattacaaccatatctgttctgactttttttttttttttttttttttttgagacggagtctcgctctgtcacccaggctggagtgcagtggcgcgatctcgactcactgcaagctccgcctcccaggttcacgccattctcctggctcagcctcctgagtagctgggattacaggtgcccgccaccacgcccagctaattttttgtatttttagtagagacggggtttcaccatgttagccagggtggtcttgatctcctgacctcgtgatccacccaccttggccccgcaaagtgctgagattacaggcgtgaaccaccgcacctggcctaacattttagttttcttattctttttttttatttttattttttgagacagagtcttgttctgttgtccaggctggagttcagtggcaagatctctggtcactacaaactctgcctcccgggttcttgtgcctcagcctcctaagtagctgggactacaggcatgcaccactatgtctggataattttttgtatttttagtaggaatggggtttcacaatattgcccagactggtctcgaacctctgagctcaggcaatctgaccacctcggcctcccaaaatgctaggagtgcgggcgtgagccaccgtgccccgccagtgtatcattttgtgcctatctttttccactcaccatgctagtgaggttcatctgtgttgtgtgtatactgaccatatattaagtagcctacttacagagaatacaaagttggtaataaaggcaaacattgaaaattgtgtttttcatcttctcacatatgaaagaaaaaagatataagtaatccaaataggatatatctcactctatctcccaggctggagtgcagggcaagatctcagctcactgcagcctcaacctcctggactcaagctaacctcccacctcagcacccctctccccagagaagctgcgactatacgcacacaccaccatgcccagctaatttttgtagagacagggttttgccatgttgcccaggctgttctggaactcctgggctcaagtgatcccccaccttggcctcccaaagtgctgggattacaggcatgagccatcacacctggcactccagcctgggcagcaagagcgaaaatctgtctcaaaaaaaaaaaaattgacataaagatactgaatttagatctcctttttgtttttctttgaatgctctgaacatcttaccaaaaggacagagaaagcatctgatgatgtctggaatctatatgagcacacatttgaaagtgactgtaataacattacatcaaatatatactgcaaagagaggctaagagagcaggagccaggcacatagccacatttggcaaagctgcagcagattttgtgccagtgggcaggtgcccagaattcagagctgggcagaaggtcaggaaaggatgggtcattcaagtccaacatgtcacaactcagcaggcaatggatcctggggcttactgcctaggtagcatgaagcacttgggaagagtgcttgtttaatcctggggctcagactggtgagatatggtagtgggtggcatgggagggaagggacatggactatatggtccacctcagaatggactaacaccatagactacccatcgtccaaaagactgtggtgcactcagcttgctccaagttgctcttggtatctaagatgagcaaatacaatggatgagacaaggcagcaggtatttacagattacaggtcttcacagattgcaggtctttcttgaagtaaagcagatggcagtcttgtgagttgcagtgtttttcccagcaggaaactgatgtcacatgcaaatagggtaattaggagaatttcatagactgtttacaaaggtgagggtcaggcaagggaaaccaaaatgaatggttcagtgaaaggaggctaccaagagggggaagccctttatatccctaggtctgaagggacaaggggcagtagtagttatagttaaagagaccaggaaccttacgctagaagcaaccttctgctagaagctcaggccatcagcaggaggatgaagccaacctacacagcaatctacagggaggaatccaggaacatcaattctccagccttatttacctcccgtcggtaccctccttggctgaatccaaagggaaggcagagggaagtagcccactgaagtcattcacaaaggtcagccttccaggatgcagaacagaatggagaaaggtcgagattggatctgaaggggcaattgcaagatacccaatacaccatatcgtctgcacatccaattcaggacaacagtctgaggctggtgtgggaggaggacactggggacccctgaaggaagtggccagtgaagatgagtcatgggcatccggttctggctgtcatcccactgtagaactagcagtatctgctggaaaccagaagcaaccaatagataaagcagcaaggctagggcaaggtatgactcagtggacaacacagtcaatttcacgtcagattcattcattcatttagtcgttcattctgggcttctcaaactcagcactattgacattttgagccaggtaattctttgttttgtctggcacttggtttgatatcagctggggtgacagaatgacttagtcacttgccactcatcatccagcagggtagcctgggcttgttcacgtgatggcagaagagcttccagcaacaagaggctaagcctcaatgcacaagtgtttttcaagcctctgtttgcatctcatttgctaatgtcctgttggacaaagcaagttacttagccaagcctagattcaaaacaccaaaaaaatttgactctatttctggatggaagaagctgcaatatattgtgggcttcctcccaaactaactcattgtgtggtgagggtggtggtaaagcaatggtggagatgttcaagagaagtgccacagacaagccacctaatgttgacaatataaatgaactgaatctaccctataattatcttagacttcccacttggcgttagcaataagtgcataaccaccaaagacggtggtatataaagttataaatagagatatcatggaatggtagaatgcatttaagtgaccagttaagcccatccagcttaccagtttgcagttcttgagaagattatccgccctttacatatttctggtatgagcattatcccaggttttatctcagaagcttggcagcttctgaaaaccgactgtttcactggaaaatgttgtgcaaactagatccagcagggtctgcatgccaacagtgaacatatcctttccaagaaggggctctccaaaacaatacgtcctaatgttctgtaggtcaaaattaagtacaaaaggctataaatcattgcttctaactagcaattagcagataggtgagcctaggacaaggacaaaatgcaccatcaatttggcctgttagaatttttgttttggagtgatatttttaagaaagagaaatataaacttaaaaaaaaacctttttaggccaggcgtggtggcttacacctgtaatcccagcactttgggaggtcgaggaaggcggatcgtgaggttaagagatggagaccatcctggccaacatggtgaaaccccatctctactaaaaatacaaaaattagctgggctggtggcacacacctgtagtcccagctacttgggaggcttaggcaggagaatcgcttgaacccgggaggcggaggttgcagggagccaagatcatgccattgcactctagcctggtgacagagcgagactctgtctaaaaacaaacaaacaaacaaaaacaactttttttgagaaagggtcttgctctgtcgcccagtctgtagtacagtggcacaatcactgctcactgtagcctcaacctcctgggctcaggtgatcctcacacctcagcctcccaagtagctgggactagaggtgctggctaactaaaacaattttttttcttttttttgtagagacagagttgggggttcagcggcaggggagctcactatgttgtccaggctactttcaaacttataaggttggctgaacagggtggctcacgcctgtaatcccagttttttgggaggccaaggcaggcagatcacctgaggtcaggagttcaagaccagcctggccaaaatggtgaaaccccatctctactaaaaatacaaaaaattaggtgtggtagtgcacgcatgtaatcccaactcctaactagggaggctgaggcaggagaatcacttgaacccaggaggaggaagttacagtgagctgagaatgcgccactgcactccagcctgggcaacagagcgagactgtcaaaaacaaaaacaaaaacgaaaaaacaaaaaacaacccaaaaaacaaaaagacaaaaacaactcatggggtcaagtgatcctttcttcttggctttcccaaggtgctgcaatcacattcccaagatgtgagccagtgcgccagctaattctcgatagtgacatggtgttaattgctaagagcatggactctgaagccagagttcatggttcaaatcccaattttcccactcactgtgaccttggacaagtcacctaatctacctgtgcctgagtttccttgtctttaaaatcaggatgtaataatagtatctactcctaatgattgttgcaaggactaaatgagttaatatttctaaagttctgaccaggcggagtggctcatgcctgtaatcccaacactttgggaggccaaagcaggaggattgattgagctcaggagttcaagaccagcctgggtaacatggagaaaccccgtctttaccaaaaatacaaaaaaattatctgggcatagtggggctgcgcacctatagtcccagctacttgggaggctgaagtgggaggatggcttgaggctgggaggcagaggctacagtgagctgagttggcactactgcactccagcctgggtggcagagtgagactctgtctcaaaaactaactaactacataaatatttctaaagttctgatctctacttaagatagaatcaattagacaaaatttgaagcattcttttttttttttttgagatggagtctcgatctgtcacccagactggagtgcagtggtgcgatctcggctcattgcaacctctgtctcctgggttcaagcaattctcctacctcagcctcccgagtagctgggattacaggcacctgccaccacacccggctaatttttccatttttagtagagacagggttttaccaccttggccaggccggtcttgaactcctgacctcaggcggtcggcctgccttggcctcccagagtgctgggcttacaggtgtgagccactgcagccggccttgaagcatccagtggtatcagtgcgtcaggagggtgattatgtacgccactagacttcaaaggccatcaccttttcttgattaacagcagcacctcagggagaggcagttgcaaaaccgtattcagcctgtttgtagcaaacccctgcatcctgtggaaggctggtggggaggaggtgggcagtataataccgcaacttagaaaatgtcagagaatttcaactatccgtgctttctcaatctgctatttccacaggttggttttttaagtgaagtcaagtgttaataaaatgtgaaaatcacagtgtgtagccatcagcacacttgtaagctagtcttggctttcttgaactacctatcagaaaaagcagtaacattcaaaagaataagtagctgccatttcaaagaataagtacttgtcaggagagcaaaaggctttttggaaaaaaataaagataatagttttaaattttaaaaaagaggccgggcaaggtggttcacgactgtaatcccagcactttgggagggccgaggcaggtggatcacgaggtcaggagttcaagaccagcctggccaagatggtgaaaccccgtctctacttaaaatacaaaaattagctgggcgaggtggtgggcacttgtaatcccagctactcgggaggctgaggcagagaattgcttgaacccaggaggcagagattgcagtgagctgagatcacgccactgcactccagcctgggtgacagagtgagactctgtctcaaaaaaaaaaaaaaaagaaaaagaaaaattttaaaaaactaaattaaattttaaaaagaaagaataaggtacttgatatacacaaatattcaaggggcgttattcacctatttaaggtgaattcaggcaggtacattggctcatgccagtaatctaacactttggaaggccaaggcaggaggattgcttgagcctcggagtttgagaccagcctgggcaacatagtgagaccttgtctctactaaaactcaaaataatcagccagatgtaagggtgtgcccctgtagtcccagctactcaggaggctgaggcaggagaatcccttgagcttgggaggtcaaggctgcagtgagccatgatcacaccactgcactccagcctgggcaagagagcaaggcactgtctcaaaaaaaaaaaaaaaaaaaaagctaattctctattttgcattatttaaaagaatttcaaagaacacagggtaacattaaatgcctaggcagaaaaataagcaaatttcttttttctttttttttttgagacagagtctcgctctgtcacctaggctggagtgccgtggcgcaatctcggctcactacaatctccacctcccaagttcaaacagttctcctgcctcagcctcctaagtagctgggattacaggcatgcaccaccaagcccagctaatttttgtatttgtagtaaagacggggtttcaccatgttggtcaggctggtcgcaaactcctgaccttgtgatctgcctgcctcggcctcccaaagtgctgggattacaggtgtgggccaccgcacctggccagaaatgagcaaatttcttagtgtcagtatcaggccacttaattaaatcacacaacactttgtttagattgattgaatcaattgtctaccgtacccaaaattctcatcttatccatcatctcttcttattgtccctccggtccacagagccaatacaaatatttgttgaatgaaagagtggtttccttcttgtaacatatttcacaatgcactctatcaggaaataattacttcctgaagtctgagtcaacagataattttgaagactgggcagagagttgtaggatttaaactggcaaaatagatcagaaaattatctcagaaaataactccattccaacaaatgtataatcattaatattctaaggatggagaaacctcagaaaagtaaaagactatttttctaccaattgggcatcatttgcaacttcattctcaagctttggcatctgattctgtcccatcctactgtcacctcctgtcttcaccaaaagggtttccttcttgatttattgcctcactgaccacattttaaaaaattaagaaaaatactaagcttattattttaaatgggatttgtttccaggttctatttggtttcactaaacctctagtgcactgaactctggccacatcaattgctgggaaaagatgaagtgggctgggcgcagtggctcatgcttgtaatcccagtactttgggaagctgaggcaggtggatcacctgaggtcaagagttcgagactagtctggccaacatggtgaaaccccgtttctactaaaaatatgaaaattagctgagcatggtggtggacacctgtaatctcagctactccagaggctgaggctggagaatcgcttgaacccgggaggtggaagttgcagtgagccgagatcgtaccactttactctagcctgggtgaaaaagcgagattctttctcaaaaaaaaaaaaaaaaaaaaaaaaaagatgagatgaattgtcttggaggaagaaagaaagaaggaaaggccagctttgaatttctgaattagattaatggggttgagacttttttttttttttaattttaacaaacaagcttgggctgggtgggatggctcatgcctgtaatcccagcactttgggaggccaaggcaggagactgcttaagtccaggagttcaagaccagcctaggcaacatggtgaaagcctgtctctacaaaaaacacaaaaattagctgggcatgatcgtgtgtacctgtagtcccagctactcggaggctgaagtgagaggatcacttgagcccaggaggtcaaggctggagtgagccaagatcatgccactgcataccactgtctgggtgacagagtgagactttgtctcaattaaaaaaaaattaataaaataaagattagaaacaagttggaagctgggcatggtggtatgcacctatagtcccagctacttgggaggctgaatggggaggatcgtttaagactaggagttcttagccagcctgggcaatttgagatcctgtctctaaaaaacataaagattttttccttttttttagacagagttttgctcttgttgcccaggctggagtgcaatggcaggatcttggcttgctacaacctccacctcccaggttcaagctattctcctgcctcagcctgccgagtagctgggattacaggcgcctgccaccacacccggctaatttttgtatttttagtagagacagagtttcaccatgttggccaggctggtcttgaactcctgacctcaggtgaggtccactcaccttggccttccaaagtgctgggattacaggcatgagccaccgtgcccagctgatttttttaaaggaaagaaaagaaacaaggtgggggaaaaatgtggtaagttgcagacatcttgctatggttattgtgtttgcagataagaatacccactatcagccgggtacaatggctcacgcctgtaatctcagcactttgggaggccaaggtgggcagatcacgaggtcaagagatcgagaccatcctggctaacatggtgaaaccccgtctctactaaaaatacaaaaattagctaggcatggtggtgtgtgcctgtagtcccagctacttgggaggctgaggcaggagcatcgcttgaacccgggaggcagaggttgcagtgagccgagatcatgccactgcactccacactccagcctggcgacagagcaagattccatctccaaaaataaaaataaaaaaaaagaatgcccactatctttcaacatttgtacgtacctgagtattctcattactatccctgcagcacaaatgactccaagcttaatagtataaaacagcaaccattttatcatgactatgtatcttatgggtcaggtcaggaattcagaaagagcaaatccaggacaactcgtctggactccacaatgcctggggcctcattggaaagactcaatcagcaaggagtgactttgcaggttctggctaaaataatctgaatgtttgctcactcgcatgtttggcagggcatggctgagaactcagctgagctgttggctgggacaccaacacatggcctccagagtgctgcttgggcttcctcacagcaaggcggccatgttctaacagtgagtatcccatgagaacctgggggaagctatactcttatcatctagccttggaagtcacgtgatatcatttccaccacaatcacaaacccacccagattcaaggggagggaacataggtcacacctcaatgagaggagtgtcagttgaattataagaaaaggggaaaggcagatattattgtggccatctctggaaaatacaaggcgccacactgggcataaaagactttttaatgtttctcaggtagtagagaggataaaaatgaccctagcctttgaatctgtttgcatagtttgaagaaaattaattactattcctttctcttcagacgggtaaaggggaaagataatcctttgtttgttaacatagagccaagatagagaaagtgagaagtattggtaaacatacatactttgataataatggatcctccttgaaactcaataatatattcaatctaagcaaagcagcctagggaagaagcttaagaaaagcgaatttggcaaagccaagtgtcaatgaagcaggaagtctctctgcagaatcagccccaaacgaataagagaattactgggtttaatgtagtactaatgcctaacatccttttttctcccccagaaccaaattttctgtttggaagtcttagtacaaccacactttgtaactagcccaagcagatatctctgccccagtttctcctcctctctcttctcctgctttctccagcacccaactctatccagacccaaggtcgatctcaactccaaaagggtgagtacctctgatgaatggctaaaacagagtgcttttccaccccactgcatttcctagaaatttctgctataagaggttcctaccatcacctgaaaatgtatagtatgatatagcccttccttctcaattagttttgggtgttcataaattacagtaccaaaggaatgctcctaattacaatgtgataggtagaattatggtcttccaaagatatccacatcctaatccctgggacctgtgaatatgttactttacagggcaaaagagactttgcagaggtgttaagtgagtgagagatggggagattctcctagatttgctgagtgggatcaacgtaatcacaaaggtccttataagagggagataggagggccagagtctcagaagaagatgtaataaataaagcagaacttggggggttcaggtgcagagtgagagagggagagaggaacagagacagagggaaagaagagaaaagaaagagagagacttgaaaatacaccactgtctttgatgctaaaggaaagagcacaagccaaggagtgcagacagcctcctttttttaattaattaattcattaattacttttttttttttttttgaggagtttcgctcttgttgcccaggttggagtgcaatggcatgatcttggctcaccgcaacctctgcctcccaggttcaagcaattctcctgcctgggactacaggtgtgtgccaccacgcccagctaattttgtatttatagtagagacggggtttctccatgttggtcaggctggtcttgaactcccaacctcaggtgacccacccgccttggcctcccaaagtgctgggattatagccctcctcggcctcccaaagtgctgggattataggtgtgaggcaccgtgcccagctttttttttttttttttagacagggtctcacttgtcacccagactgaagttcaatggtgcaatctcagctcactgcagcctctacctcctggactcaagggatcctcctgtctcagcctcttaagtagctggcacctggtgcaccccaccacactcaactaattttttttatttgtaaggatgaggtctcactatgctgcccaggctggtcttgaactcctgggcttaagcaatcctcccacctcggcctcccaaagtgctgggattacaggagtgagccactgcacccagctgcaggtagcctcttgaagctggaataggcaaggaaacattcttctctggagtctccagaaggaattcagccctgctgacccaacaaactgtgttgttttaagccactaagtttctggtaattttttatagcagtaataggaaactaatgcaaatagctttttttggtggttgtttgttttagatattgcatgaggtttattgtgaaagctgggaagaattaatttctacaagtctttatgaactgagactggatcaatgtgatgggggtttaaatgaagtcctgggcagtgccttctggaagcaatacatgaagagatgaagaacaaaatccaagatcactgtcctaaaataaactttccttctgcttaggggcataatgactcacatagggtataacataaacatcgcatctgacacttgaactgcttaagtttgttattgcaggcctggatcatatttatataaatctgaatacgctttcaatttggccaggaatttgttaacacttttttttgagatgaggtcttgctgttacccaggctggaatgcagtggcaccatcttggctcactgcaacctccacctcctgggttcaagtgatcctctcaccacagcctcccaagtagctggaactacaggtatgcaccaccacacctggctaatttttttgtatttttttgtagagacgggttttcaccatgttgtccaggctggtctcgaactcctgagctcaagcaatcctcctgcctcgccctcccaaagttctgggattacaggtgtgagccaccatgcccagcaacacacccccacttgttgtttttgagacagtgtcgctctgttgcccaggctggagtgcagtggtgcaatctcagctcactcacttgagtcagctcacttgatcaatctcatcctcgaccttgcaggcttaagtgatcctccccctccagcctcctaagtagctgagaccacagatgtgcaccaccattcctagctaattttaaaacttttttgtagagataggtttcactgagttgcccaggctggccttgaacttctggactcaagcaatcctcccacctcggcctcccaaagtggtgggattacaggcatgaacagctgcaccaggcttgttgacacttctgaccccaggttgtatgaaacagtgatacatgccatgtcaatagactattcaaaactcaaatatgataactgtgaagtgggaagttagccatgcctcaatgctacagttagctacaactaaacaaatggaatattttatttttcaaatctttgttagggcatgtaaaaaataggattctcttgagaaaggcccaactcatgttttctgtgtgcccatttagactcacttgtgcccttctccatcctgctgtgtccctgggcttcactgccttccagcttaagaatttggcaaatggagaacccttgcaggcaatcaaagggaatgaagagggtgactttcctcacaaataacctgctactcaaatcctgattcaaggtcttcttctgggagaacccagtctaagacagcatgtatctaggagctgccccctctttaggatgggtccttgcagacttgcttgtaccacccatagccgtctggacccaagttgggcacctggcccatgctgtacccatcagattctctctttctctctctcttttttttttttttgagacagtctcacactgtcactcaggctggagtgcagtggtgcaatcttggctcacagcaacctccacctcccaagttcaagctattctcttgtctcagcctcccaagtagctgagattacgggcgcaccaccatgcctggctaatttttgtatttttagtagagacagggtttctactaaaacagtcagccatgttggccaggctggtctcaaactcctgacctcaagtgatccacctgtcttggcctctcaaagtgctgggattacaggcgtgagacaccgtgcatggccctatcagattctctttccctgagtttttgtatgggaacagagagcacgttgattagtgtctgcagaagcctggagctttcacatgtgaacttggaaactttgcagggacatagtttaccatgtgggtagggaaagcaaagaaagcctttctgcagaaagggagaaagagagagagacagagagacagacagacagactaggagagagacaggagaatgggcaagagaataagagatgagagattgctttctgttctagggtccctccctttctgaaaccctcctacatccagctcctggtctgtgaatgctgccaatatatgtacaataaattccctattgtctctcaagctagctcaaataacttctattacatatcaccaaagagtccgttagtccagaaaagcatcataaaattacactctgattctcagtgagccagaaagttctgccctcactatgccccttgtaagaatttccttctcacagccctgaaagggcaatgattgttaatctccccacaggtgaatgaacaagtcttccactaccctccggcattcataaaacctgacttgaagacctggctggccatagagtaaggcctttgtggttcaagacaatccggggtggaacaatgtatttcctaactgccttagctagaactgcacaagctcatgaagcaaccccaaatttagagatatgtggcagtaggagggaaggcaggatatgcacaggcaagaacagactgtgatgccaattctgcaagcttcctgactcctgcttgctgtctaccagggttgccagatcctcagcctcgctgtctttgtgactgggctgctcgaagctgtggctataacaggcagctctcaatgtcatgctgacactggggagcagcagcaccttgacacaaaatctcttctttctcccagcctgccacagttcatgagatcctcattattgcgttgttcttttgcttaaagtatgattgacagaatgtcactttcagaagcacagtgtatattacaaaagaacagaaagaagactggaagcatagtcactacctatatgttctgctgctctgggccatggagctgctcaatgaccccaggtttggtcgccagaaccctcactgctactttatcctccatagacatccatccacacagacctctcccactgaagtcctgccacctcccaggagctcttgcagaggcaggggctggatccatctcttctcctagtgttggggggtgagtgtgtccagggtggggaatccatcatcgcacccctgatcttatcctagaaaaagaaaactgctttctcttccctctctgggacaattgatataattcttctagacagaccagccctcttaaacaaaggcctgagactggggaatgtgttcggcccctatgttcctggccaaagaagcccggaagtttatcctttcgttccagaatagagtggcagcagggagatttctttcttgctttttggtgatgagagaaaggatagaagcaagggattacagcagaaacaatgaaagggccgcaaactctgctgggcttagattcattcatttgttgaacaaatatctgttgagtgtctataccaagtactgggaatacaaaaacaaggtcctgctcttgtgaaacttagagactgaacaaggagatggttagaaatcagataatcactccaagacagcggttttcaaccagggggcaattttgccctccaggggacatttgggagtatctggagacatttttgtcacaactgcaggggctgctactgacatctaataggtagaggccaaggatgctgctgaacagcctacaatacacggaacaacccctgtacaataaagaatgatctggcccaaaatgccaatagtgccaaggctgagaaaccctgcactaaggcagtggttatcaaagtgtgctccacagacaggtggcatcagcatcgcctgggaacttgttggaaatgcagattcttcagtcctattctaaacctactgaatcagaaattctggaggtggaagccagtgacctatgttttaatgagccctccaggggattctggtgcacactaatgtttgagaaccacttaattaaggaatggaagggatctatcattacaaacggagacaaatgttctgaaggaaaaggactgtaccaatgctactcacaaagcggatcggcggcatcagcatcatcagacagctcattagaaatatgaattattggcagggcgcggtggttcacgtctgtaatcccagcactttgggaggccgaggcgggcggatcatgaggtcaggagatcgagaccatcctggctaacacggtgaaaccccatctctactaaaaatacaaaaaattagcggggcatggtggcaggcgcctgtagtcccagctacgcgggaggctgaggcaggagaatggcgtgaacccgggaggcggagttcacagtgagccaagatcctgccaccgcactccagcctgggcgacagcgtgagactctgtctcaaaaaaaggaaagaaaaagaaaaaaagaaacacaaatcattgtgccccatcctagacctactcaatcaaggggaggtgggtagggaccagatcaagaaaaccacgaaggggggtggcattctaagtaattaagactttacaggctgggtgcagtggctcacacctataatcccagcagtttgggaggctgaggtgggaggatcatctgaggtcagaagttcgagaccagcctggccagcatggtaaaaccccatctctactataaatacaaaaattagtcaggcatagtggtggacacctgtaatcctagctactctgaaggctgaggcaggagaattgcttgaacccaggaggcggaggttgcagtgagccgagattgcgccactgtactccagcctggtcgacagagcaagactgtctcaaaaaaactaaaaacaaaaacaaaaaccctagaagataggtgttgtaggggagaatgatggagataaggttgtagataggaagatgggaagctgaggtacctcatgcctgaaagcatccatttgtccgggttggcagaggtcagagaaggaggaagacaatggctttagaagatagtgaaggtttaaagcaggcttcatgggactggaagagggagctgaccaggtaccagtgcacaattaaccgaggtgccagggtctgcttgagggtcagtggtcacgtacgtggccactaactgcagctgtgtagtactcagcagtcttggtgtggggactagaaatatgaagattggctcaatctatgaattttctccaaatttcattccctgcgacacagctcctcttttaattcttctgattatatgctggggcagagactgttacttgaaccctattattcattctaacttaactgggcacatggcttccttgagtaaagattacatttctaagcctgtcttccaagtttgatgtggtcacatgacaaagttctgactaaaaggatataactggaagttttgtacatgatttgattaccagtccttaaaggggcaggcatgaccatcattctttcttcctgtttccccctggctggaatgcagacacaatggcttgaactcaagcaactgctttgggtcatgaaggggaaaccacgtgtttaaatggcaaagaaacaagatagaagaaatcttagtctggtatgataatgaagcctgtaatcagcactggaccagctgcccctggtccagtgctgatttttttacatgaagaaaaaatctacatgcacaagttttctgttatatgtaactgaagctaatccgaaattgtccgttctccctgctctcgtggtcagcctcacctgcatttatattctgtcaattccagatgcctatgtctttctcaactccctgtttcagcttcctctgggtctttttgaatacctaactcatggtttgacctggcatcagctctgcttgttcaaatctctgatcaaaggcataccaaatttgcctctggggcatctctgtttatattttacttctgattaaattgcagtggaaatcccacaaattatttctcacttatttttggtactgcatcattttcatagtgctatcaataactatgccatcatgttttatagaagaaaacgtatgaattcctttatatcttgtgggtggaaaaaggtatttctaactcaaagttgagatgtaataaaagattaataaatgtgataatttaaaaagaagaggccaggcatgttggctcacacctgtaatcctggcactttgggaggccaaggcaggcagctcacctgaggtcaggagtttgagactagcctggccaacaaggtgaaaccccatctctactaaaaatataaaaattagctaggcatggtggcaggcgcctgtaatcctagttacttgggaggctgaggcaggagaattgcttcaatctgggaggccgaggttgtagtcagccgagatcgcgccactgcactccagcctgggtgacaaagcaaggcttcgtcttaaaaaaaaaaaaaatcacacacacacacacacacacacacacacacacacacgcacgcacacaataaaatgaagaaattttgcatgacaaaaagtacaataagcaaactaaaaaataaccccaccataaataaagtcaaaagacaggtaaatgacttggaggaaataatttgcaacatgtattacatgtgttatggataaagggattaatccccttatctgtctattgaacaagttgagagggagaaattggctggagaacagaaaggaagagaaggggagggaaaggaagaaaagggaagagaaggaaggggagaggaggggaggagaggagaggagaaggaagggaagaaaatgaacagagtgagtatcctgtgaacatgctgggacagaggatagggcataggaagacaaaaagggactgtcatcaactttggtgctaaacgaagggaaagaggagcaggtggcccagatctggatgggtttggatgtttaattgcatgaggaagcaagtcaacagctgcgaaggagaagagggaaatttaaaataatcctggtggaggggaggagcctgtatttggctaaaagaccagactctgttgagtgagtgcagctggtgaggatgaatttacaaaggagttgttgtccctatgagtgacttttccctggcagttcttgagaatagagttatttgactttttattgtcttctcacgcaaaggagtcccttctaatttgactttgtcattatgggaactttttccctacagatccataaggaggaaagaaatgaagggatggtcagcaaaaagcagtttaattactactaaaaatagcataggccgggtgcagtggctcacaactataatcctagcactttgggaggctgagatgggtggatcacttgaggtcaggagttcgtgaccatcctggccaacatggcaaaaccctgtctctactaaaaatataaaaattagttgggctcagtggcatgtacctgtaatcccagctattagagaggctgaggcaggagaacagcttgaacctgggaggcagaggtggcagtaagccgagatcatgccactgcactccagcctgggcaacagagcgagactccatcttaaaaaaaaaaaaaaaaaaagcatagacaaggcatggtggtttacgcctgtaatcccagcactgtgggagcctgaggtgggaggactgcttgagcccaggagttcaagaccagtctggacaacacagtgaaactccctgtgtagctaggcatggtggtacatgccttgtattcccagctacttggtgggaagtggggagggagaatagggtggactgctaaggcaggaagatcacttgatcgtgggagatcaaggctgcagtgagccatgatcgtgccacagcactccagcctgggtgacacagtgaaatcctgtctcaaaataaatacaaattttaaaagtatgttcaattcattaagtttgtcaagtaaaacaagtaagcaacatcagacacagagagaggtagaaaaactcagaagtttctgaaagggacattacggacaactgttaggggaaggctggtggtaagtttttcttatcaccttaattcagaggacactctcactactttttgcaacatggttgggtgactaagcccttgctcagagttcaaagtcctaatgctattaatctctgagatgattctctgaagagggtaggacgcagattgtctacgtctgaagtggctgtgggtgcagaagatatctaaacatttgcaatttgtttgttccttctttgccacaaccccacccccactccatgcaatctgcagattaaatacacatgaattgtttcctgttatgaaaatctcctctgctgggtgcagtggctcatgccatgactgagatcacgccattgcacttcagcctgggcgacagggcgagactccatcccaaaaaaaaaaaagaaaatctcctcatgcccagggctcataagaatggccttgggccttaggggatggtaaattacatgctaagagaatgtgaacatggctaagttattttgtaaaggggaaaaggcattaggaccttggcatccttaatgagagcagaatactgactaatgctccatagaaaagattagcaaatctgtaatgacaatattattaaaaagaaaaaaaaaaagccagtcctctggggttcagaggaaggaaaagtctcaggtgtcctgcctggaaagctatgtctgcatctaagtactgccagagccccagctctgtgggtctgcagggctgtgcaccagaagaccgaaaagctgctatggagtcactggtctgctttgatgggtagctgctgtttgttgggaaactgctgttttcaggtagggaaggatgtgatgtcagggagaacccagccagagttgagatttccttgctgtttgaaggtagattgtcagcgtgggcttgtttctgtgggttatgttgacctggaagtcttccagcccttagatccatagggctggttctaggcaagaaggtctgtgtctccctcctgagaagcctccgataccccctgactctgggagagacttctaggcatcattctaataacccagcttcaaacttactgcctatgcagagagctgatgtgaaagtatttgcattttgaagggggactccacaggactcaaagaaatgcatttcattttgttttgttttaagatagtctcactctgttacccaggctggagtgcagtggcacaatctaggctcactgcaacctctgcctcccaggttgaagcaattctcctgcctcagcctcctgagtagctgggactacaggcgtgtgccaccatgcctggctaattttttgtattttttggtagagatggggtttcaccatgttggccaggctggtctccaactcctggcttcaagtgatccacctgcctcggcctctgaaagtgctgggattgcaggcgtgagccaccacatctgtccaggaatgcatttctaatggtggaactgcaagtacgtagagtgaaaaagatactttgggcaggatgttctaccctgtgctgttcaaattacctgttaaataggaatcaggtaatttgtgggtattagtgggtagccacccacttcatccttttgagagcctggctctgccctttggaagtttagaaacatctggctcaccgtttttctgaaaagtatgctgacttcagtcagttgtaaggacttactgataatgagtatttacaactagacactattagtggacagcaggttaagtgcttttctctttcagagaaaaggttttattatctcctttttttttttttagggggggacagggtctcactctgttacccaggctggagtgttgtggcatggtgtcggctcactgcaacctccatctctcaggttcaagcaattctcctgcctcagcctctcgagtagctgggattacaggcacccactatcacacccagctaatttttgtatttttagtagagaccatgtttcaccatgttggccaggctggcctcaaactcctgacctcaggtgacccacccgcctcggcctcccaaagtgctgggattacaggcgtgagccaccgtgcccggctgcctcctttttatagaacaggaacaacaggagccccaggagctggtgctgcggcctgcaggagacatgaagttagcactttgcctctctcctgagtctatatggccatccacaacaaaggaggaagccaattaaagataataagcctaaggaaagcgatgtcttcagattattttctacttcaattgagttggggcatctgagtttcttaattacacatttttctttcatttatgcttttattagtgattttccatggcttgggctttaagaaagccactttagcaacgaggcactctgacactggggttgttataacacacatgagagatgtttctaaaacacacagaggatttgggtcacagctattcagtacagggttgtctgctgtatctattttaatgatttaataattaatgagttcaacatgctctggttcaatttttttcttcaattaatactaactttcaaattattttctgagattgggaatagtaattgttattcattttcagataatagcactcttcgcagttttttttttttttttttcgagacagagtcttgctctgtcacccaggctggagtgcagtggcattatctcggctcactggaacctctacctccagggttcaagcgattctcctgcctcagcctcccaagtagctgggactataggcacgttccaccatgccaggctaattttttgtatttttagtagagacggggtttcaccgtgttagccaggatggtctcgatctcctgacctcgtgatccgcccgcctcggcctcccaaagtgctgggaatacaggtttgagccactacgcccggctctttgcagttttagtattttaatatctttttagccaactctgccacatatgagctctgtcacggcttatctattaatacattctctgcctcagtttcttcatctgtaaaagggacataataatagtatcttttttttaagaggtgctggggaatgaacccagggaataacaatatcttaatcacagcattgtagtgaagagtaaataaagaaattcatgtaaatcatgctcttattacagttctggaaccctctaccaagtttagctattattaacattattataattgttttgaattacaaaattagtatgtgcttgttattaaaaaaaaaaaaaagaaaaaagttcaggccgagtgtagtggctcatgcctataatcccagcactttgggatactcagttggatcgctgagctcaggagttcgagaccagcctggacaacatggtgaaaccccatctcaacaaaaaatacaaaaattagctgtgcctagtggtgtgtgcctgtagtcccagcttctcgggaggctgaggtgagaggatcacttcagcctgggaggcggaggttgcagtgagccaagatcgtgccactgcactctgacctgggtgacagagtaagactctgcccccaacaacaacaacaacaacaaaaggcgaggcactgtggctcatgcttgcaatcctagcactttgggaggctgaggcaagaggatcatttgaggtcaggagtttgagaccagcctggcctggccaacatggtgaaaccctgtcctactaagaaatacaaaaaaatgagctgggcatggtggtgcgcacctgtaatcccagctactcagaggctgaggcaagaaaataggttgaacccaagaggcagaggttacaatgagccaagaccaagccactatactccagcctgggtgacagaatgagaccctgtctcaaaaaaaaaaaaaaaaattcaaaacaatctaaaacatagaggtttataaagtaagaaatgatagcgtcctctcttgacccagccccacccaatcctgctttctggagataaccactgtatttggaccacagtctttccaggcatactcatgcaatgtcttggaactttgcctgtcccatctaacaaattgaccatgacatctctccacagcagctctgcgggaagcacctctttacataatatgggtatcatctgaccttgcctgatttgtatgtggctccagtatgtgtttagagtgtctttcacattactgtgtagttaaaccctccttcttttccttagacctactgggttttgtctaatgcttttaaagacctttgcagtcaggagcattgagaaatacacttgccaggattggaaaatgaagaggtccggtgtggtggcctgtaatcccatcattttgggaggctgaggcaggaggattgctttagtccaggagtttgaaactagcctaggcaacatagtgagacctcgtctctacaaaaaatgataaaaaaaaaaatcagctgggcatggtgatgtactcctgtaatcctagcttctcaggtgtgttaggtgatagatcacttgagcccaggaggttgaggctgcagtgagctctaatcatgccactgcattccagcctgggcaacagagtgagaccgtatccggaaaaaaaaaaatccactcaaaggtatttgtcaaaaaaacaagtggatattcaaaaagagaaaaaaaactgagtgattgttacatctttgacagtgagatgtttctattaatatgctttttaagttgaaagataaagttgtatatatttaccatgtacaacatgatgttttaaaatacacatacattatggaatgactaaatctagctaattaacacgggcattgcctcacatagttttcacttttgtggtaagaacacttcacatctgccctcttagcattttccaagaatacaatgtattattgactatcaccaccacaatgtataacagatctcttgaagttattcctcctatttaactggaattttggccatcatctctccagactgtcctcctcacaaccacctcatctcctggtaaccaccagtttactttctctctcctctttttttcatttttatttttttgagatggagtgtagctttgtcgctcagactggagtgcagtggcacaatcttggctcactgcagcctctgcctcccacattcaagtgattctcctgcctcagcctcccaagtagctgggattacaggtgcatgccaccatgcccagctaatttttgtatttttagtagagacaaggtttcaccatgttggccaggctggtctccaactccagacttcaggagatccgcccgcttcagcctcccaaagtactgggattacaggcatgagcccccatgcctggcccaccattttactctctacctctgcaagatcaacttttttggtttctacatttaagtgagatcacacagtatttgtctttctgtgactggcttatttcacttaacataatgtcctctaggttcactgcgtgttgttgcaaatgacaggagttttcttttatggctaaatagtattccattgtttgtatataccatattttctttatcagtttatccattgatggacacttagactgatttctttcttcctttctttctttttttttgagacagagtctcactctgttgcccaggctggagtgcagaggcgtgatcttggctcactacaacctccacatcccgggttcaagtgattctccagcctcagcctcttgagtagctgggattacaggcatgcaccaacacactcggctaatttttgtatttttattacagacggggtttcaccatgttggccaggctggtctcaaactcctgacctcaagcgttccatccactgtggcctcccagagtgttgggattacaggtgtgagccaccgtgcccagcctggtcaatttcatgtcttggctattgtgactagtgatgcaaagaacatgggagtgcagatatctttatgaggtagtgatttattttcctttggatatatacctggtagtgggattgctggatcttatgatagttctatttttaattttttgaggattttctataatgctttccaaaatgactatactactttacattttcaccaacaggtacaagggttcccttttccatcctcactagcacttgttacctcttgtcttttctttttttgtctttttttttttttgagacggagtcttgctgttgtcacccgggctggagtgcaatggcatgatcttggctcacttcaacctcggcctcctgggttcaagcaattctcctgcctcagcctcccgagtagatgagattacaggtgcccgtcaccactcctggctaatttttgtatttttagtagagacagggcttcaccatgttggccaggctggtctcaaactcctgacctcatgtgatccacccgcctatgcctcccaaagtgctgggattacaggcgtgagccactgcaccagcccggcctacagtgtgtctttttgataacaactattctaaccggtgtgaggtaatatctcactgtggttttaatttgattttccttgattattaatgatgttgaacttttttaatacatctattggccatttgtatgtcttcttttgagaaatgtctattctgatcctttggccattttaaaatcaggtcatttctttccttgccattaagttgtttgaattccttatgtgttttggatattaactccctattagatgcatagtttgcaaatattttctcccattctgtaggttgcctcttcactttgtggtttgctgtgcagaagcttttaggttgatgtaatcccatttgtctatttttgcttttgttgcccatgcttttggaatcacttcaaagagtcattgcccaggccaggcgtggtggctcgtgcctgtaatcccagcactttgagaggctgaagcaggtggatcacctgaggtcaggagtttgagaccagcctggccaacatggtgaaacaccctctctacaatctacaaaaaataccagggcatggtggcacgtacctgtagtcccagctattagggaggctgagacaggagaaacgcttgaagctcaggagggggaggttgcagtgagccaagatggtacactgcacttcagcctggacgacagaatgagactctagctcaaaaaaaaaaaaaaacaaacttgaagataggcagcattgtaagcacataaaaatctttatcaccggccgggcacagtggcttacacctgtaatcccagtactttgggaggctgaggcaggtggatcacaaggtcaggagttcgagactagcctggccaacatggtgaaaccccgtctctactaaaaatacaaaaattagcagagcatggtggcttcgcgcctgtaatcccagctacttgggaggctgaggcaggagaataggttgaacccaggaggcagaggttacagtgagccaagattgccccactgcattccagcctgggcgacagagcaaggctccgtctcacaaaaaaaaaaaaaaaaaaaaaaggagtttacagtccatctgatattttttcttcttggctgtcaacttactgtttaattatgcctttagactactgcatgattgaaaaagcactaagatgtcttttttttttttgtcttttttttttttttttttgagaaggagttttgctctgttgccaggctggagtgcagtggtgcaatctcagctcactgcaacctctgcatcctggattcaagtgattctcctgcctcagcctgccgagtagctaggactacaggcgtgcgccaacacgcccagctaatttttgtacttttagtagagatggggtttcaccatgttggccaggatggtcatgatctcttgaccttgtgacccacccgccttggcctcccaaagtgctgggattacaggcgtgggccactgtgcccagcctttttctttttctttttctttttttttttttttgagacagagtctcgctctgccccccaggctggagtgcagtggcacgatctcagctcactgcaatctccacctcccaggttcaagtgattctcctgcctcagcctcccaagtagctgggactacaggtgcccaccaccatgcccaaccaatttttgtatttttagtagagatggtgtttcaccatgttggctaggctggtctcgaactcctgacctcaagtgatccacctgcctcggcctctcaaagtgctgggattacaggcataagccaccgcacccggtataaccccatctctacataaaatacaaaagttagctgaaagtggtggcaggtacctgtagtcctagctacttggaaggctgaagtggaaggatggcttaagcacaggaggtggaggttgcaacgagccaagattgtggcactgcactccaacgtcggcaacagagccagaccctgtctcaaaaaaaaaaaaaaaaaaaaatgccttgagactcattaattattatacttaacccttgaacttttgtgacgtttccttatctctttcttaaagccaagtccttagatgagaaagtaattagatcaaggttcagaatggcaaagagagataagataattgcaaataacatcatcctactttgaaagagctattttggtctttcaactaaaatgactttttctgctgaaagagatttggctgaagtagctggctcagctgatggcagagaatcaacaaaatatgaagagcttcataaaattgtggcataacccaatttatgcagccattatataatcaatggcaaaacagaagggaatctaaaacaatttataatttactttgggaatacaataaactattttgttgtctctggcaagattttgttgtgatgcttatttcaattagttttcatttcttaggcatggactaactaaaagtgtcaagacagtatggtcggaggcatgcttatgaaactgcctttgcaaaaattacaactgagaaaattatgacagtgaaagagatctgacctaactgactccatcttgcttctaacctccaagctgtccttgttcattcctgggtgtaggctgcactaactttgggagtttatggcttcactttgaaacaaagatgataacaacccttccccaaaacaaatccctttcctggagactagactgcctttgcaggactagtaaataagcctcagggttagaaatcatggtttaggattcatgcagctggctggcggtggggaggggggaatcacttgaggtcaggagttcaagaccagcctagcaaacctgatgaaaccccatctctactaaaaatacaaaaattagccgggtgtggtggcacgcacctgtagtcccagctacttgggagactgaggcaggagaatcgcttgaatccctgaggcggaggttgcagtaagccaagatagcaccagtgcactccagcccgggtaacaaagcaagactccacaacaacaaaaacaacaacaacaaactaagaccagtgcttgagatattttccagaccttgcacttgacggattagctggcatcgctcagatcaataaacaggctcatctggtcttgtggcccccacccaggaattgactgagtgcaacaggacagattcgactccctatgatttcatctctgacttgatcaatcagcactccccactttctgatccccctacctaccaaattatccttaaaaaactcaatacctgagtttcaggtactaatctgagtactaataaactctggtttcccgtgcagctggctctgcatttattactctttatctattgcaattcccatgcttgataaatcagctctgtctaggcaacgggcaagaagaacccactgggtggttacacttatgtggcaaaaaaagtcactatcgacttcagaaatttgcaccagcagcccacagaaagaaaaataaggctcatcatggaaaagccacaacagaataaataagagttaatttatacctagacttttttttcaagcaaaggtagacactagcaaaggctttaaggtttgtttcactgataacaagccatgaagaagtcatgtttctgagatttcttagagggtataaagttgagtgggttgtgaatgaggagtggggaacaggtgagacctgggaaaagacttatttattcgtgcatataacaatgatttcacttatatgtgagtcactgagctgggctctgaaatacaagcagagaaaaagataaacgtggtctttgcctttgagatacttacagtttggtgggaaaagcagaaaggacaaaggagtttagagcaatctgggtaaacagaggaaagtgagctattcttgcaagggaccactaactcttttcagataagtcagagaaggttcctggaggaaaaattggttaaagctgagattgtaaggaagataaacatcaaagaagagagaagagtgttcgtaagggaagaaattgcatgggggaagagctcagaattgagagaaggcaagcatggagtatttaaggaaaagaaagtccgggcatggtggctcacacctgtaatcccagcactttgggaggccaaggtggcggatcatctgaggtctggagttcgagaccagcctgaccaacatggtgaaaacccatctctactaaaaataaaaaaattagctgggcatggtggcacatgcctgtaatcccagctgctcaggaggctgaggcaggagaattgcttgaacccgggaggcagaggttgcagtgagccaagatcgcgccactgcactccagcctgggcgacacagtgagactccatctccaaaaaataaataaataaataaataaataaaaggaaaagaaaatagtgtataggtaaaatatttatcttaagtccaggactcctaatttatgggttattattccaatttaggcatcgataggaggctatgagtatacactactctttcaagaaaatggtgaaaggggaaaagagccctcagttttgttaaattttataagaggcaattgatttggtctgacctcctccactaggccccagcaggccaggccaaatcagaactgagttacttgtgctaagtgccatgtaatcaaactgaactttgaaacaagcccatcttccagaaaacgggagattccagtcaatctgagtaaatataataaggaagtcttctctgttttaaccctacaaggaaagtaactttgaaatgatcaatttgcagggccgggtgcggtggctcatggctgtaatcacagcactttgggaggcccaggcgggaaaatcacttgagatcaggagttcaagactagtctggccaacatggcaaaaccctgtctctactagaaatacaaaaattagccgggcatggtggtgcacgcctgtgatccaggtactagggaggctgacacacaagaatcactttaactcaggagatggaagttgagatcgcaccaggacactccagcctggacgacagagtaagactgtctcaaaaaaaaaaagaaaaaaaaaaggacgatcaatttgctttttgttcaaatctctttctgcattctttagccccttttctgcctatgaagctaaccttgtctgctcagctcattggaacattcaatcttatagaatgagatgctgcctgattctagaattgtaaacaaaagccaattagatctttaagctaaatcttaattttgtaattttgtctttagacagtctcttttttgtggtcctgcagttgtggcagttatgtagttatctgcatgcatcagaatattacaatattttcatcctcatctttaatttctacttttcatatttttaaaatgtagacattcaagtttatttatttatttattaaaaccattttgtaggccgggcacggtggctcacgcctgtaatcccagcactttgggaggcccaggcaggcggatcacgaggccaggagatcgagaccatcctggctaacacggtgaaaccccgtctctactaaaaatacaaaaaattagccgggcgtggtagcgggcgcctgtagtcccagctacttgggaggctgaggcaggagaatggcgtgaacccgggaggcggagcttgcagtgagccgagatggcgccaccgcactccagcctgggcaacagagcgagactccgtctcaaaaaaaaaaaaacaaaaccattttgtagagacaaggtctccactgtgttgcccaggtgggtcttgaactccttgcctcaagtaatcctcccatcttggcctcccaaagcagtgggattacaggggcatgccaccccaccctctccaagacattgaattttatttatttttttttttgagacggagtttcgctctcgttgcccaggctggagtgcaatggcacgatcttggctcaccacaacctccaccttctgggttcaagcgattctcctgccttagtctcccgggtagctgcgattacaggctgcaccaccacacccagctaattttgtatttttagtagagacagggtttctctgttggtaaggctggtctcgaactcccgacctcaggtgatcctcctgcctcggcctaccaaagtgctgggattacaggcgtgagccactgagcccagacgaatttttttttttaaaaggcaaggtctagctctgttgcccaggctggactgcagtggcaagaacatggccaactgcagccttgacctctcaggctcaagcaattctcccacctcagccccccaactacctgggcctacagacatgtgccaccatgcctcgctaattaaaaaaaaattttttttgtagagacagtgtctccctatgttgcccaggctggtctcaaactcctggcctcaagtgatccgtctcagcctcccaaagtgctgggactacaggcgtaagccaccgctcccggccaacatttaaatttttgaatattttttctgttcccttagggtttaccaagcacatttatcgacaagcctcctcaggaaattgcccaaaatagccacatgtggcaagcctcattgacaggccaaaagcctcagtcaacatggccgcgaccggcttccattgcccttcactgcccgcagtaaggatggctccggtgacttccttcgaacctcacatttcccataaaaaagatggcgccattgcttccgcgttccggttgcggatggtgagtgtgtcggggggcttggcggcttttctcctcagttttctggagtgctttggaggagaggtaagcgcgggatgggatgggggggggttggagtggtgggggcgggggtcacagcaatgcatctgatcgttctctctcaattaggaagttatggaggctttcctaggcatgtcaggatttcctgctagctccccgccccttccgccccaacacacggtgtctgcagcctgtgctttggggaattttgggaatttgtggatagtgagtatggataagcttcggttttgttgtttttttttaaattttttcagtgacctgccacttcaggaggttctgctaaaaaaccaacaaacaaaaaaacagctttcttgggaaatttctattcacctactaagtaaaatttgcccatttaaagcgtaaaaaaaaatcaagcctagcatagtggcattcgcctgtagttccagctgctcaggagactgaggtgggagaatcgcttgtgccccggagttccaggctgcagtgagcccagatcgcgccactgcactccagcctggaagacagagcaagacaacgtacccaaaaataaataataaagggtaacattaagggtttttttgttgttgttgacagaattgtgcatctattactgtgatctcattttagaatactttcatcactccaaagaaaaatcctgcctccagtagcagtcattctacattcaccacgtccactccgcctcaagtcctagacaattgctagtatactttctgtctgtatagccttgccaattcgcacgtttgatataaatgaaatcatacagtgcagctggcttctttcattaagtataatgtcaatgtttttgtgactagcttctttcatgacttttgttctttttttaaacggagtctcatgactctcactctgtagcccaggctggagtatagtggcacgatcttggctcactgcaacctctgctgcccaggttcaagctagtctcctgcctgagcctcccgagtagctgggactacaggcgcctgccaccacgttcgactaatttttgtatttttagtagagacgaggtttcaccatcttggccaggctggtcttgaactcctcagctcttgatcaacctgcctcagcctctcaaagtgctgagattacaggtgtgagccaccacgcccggctatcttcttatactatgtataatattttcaaagcttgtctttgtatcatgtgtcagactgttagcaaataaataaaactctgtaaactattttaaagcggtttattctgagccagtatgattgaccatcgcccagagagaaaacacaaacccaaaaagtctttagtaagtgatcccgaggcagttgggttatagtttgttttttttacattttagggagacaggagttaacaggcaaagacataaatcaatacatggaaggtatacattggttagacccaaaaaggtggatatgtccaagggtggtcttagaagtcttaggtggattttagggattctttagctgacagttgcttgagagagttaagctttgtctaaagacttgaagtcagtagaaaagaatgcttgaactaagataagggagttgtgtggttcaaggtccttgttacgtagatgaagtgtgagtagcagcctcagagaatagatgggctaggtgccatgactagagatgggctgggctccatggctcacacctgtaatctcaacgctttgtgaggccgtggcaggcagatcacttgaggtcaggagttcaagaccagcctggccaacatgatgaaacaccatctctacgaaaaataaaaaaattagccaggcacggtggcgtgcgcctgtaatcccagctacttggaaggctgagacacaagaattgcttgaacccaggagacaaaggttgcagtgagctgagatcgcactactgcactctagcctggatgacagagtgagactccatctcaaaaaaaaaaaaaacaaaaaagagagaatagatggtaaatgtctctttttggaaatttaggtgtcagaattaatctttcctggatctgggaaaggcctagaaaaggaaatcctggctgcattaatggagattctctacagatgcaaatttctgttacaaaagacagctttgtagctttgtagggccattttaaaatatgtcaaagaaatatattttggggttttttttttttttttttgaggcagagtctttgttctgtcacccaaactggagtgcagtagtgcgatctcggctcactgcaacctctgcttcccaggttcaagcagttctccgtctcagcttctggagcagctgggattacaggtgtgcaccaccacacctgactaatttttgtattttgtttgtttgtttgtttttgagatggagtcttgccctgtcacctaggctgtagtgcagtggcgcagtctcagctcactgcaacctccacctcctgggttcaagcgattctcctgcctcagcctacggcgtagctgggattacaggcacgcattgccatgcctagctaattttttgtattttcagtagagatgggggggtttcaccatgttggtcaggctggtctcaaactcctgacctcaagtgatccacccgcctctgcctcccaaagtgctgggattacaggcatgagccaccgcacctggccgacataaaatatttttatttcattcagggtttgctatctgtcatgtgatgctataccagtgtcaggttggaagataagccacattataccaggttaataaaaaaagaaaatcccatttaacaagattttatggtctgtaggatgtatcctaacctatgtcttgcatggcctaggtcttgtttataatttggtatcttttttaacaatatatataaatataaaacatagagacagggtcttgccgtgtggcccaggctggagtcgaactcctggtctcaaaggatcctcccacctcggccttccaaagtgatacagaagctaaaaagaaattaattaggcagttagcgagggttagggagtccttggtaaagttttccttttaataaaaagcagccccaaatcatttctaacaaaaaacagcctgaaaaatcaagctgcaagcgtagataagcaagctggaagcttgcataggtaaatgccggcagctgtgccactagaaaagggatttctggaagccaggtatattcaacatagaggtttcctcttccctttactttgtcgccacgtgtacaagcaacatggcactggccaggttaaatctctatttgtataataaaagattagggtgggatggccagcctcttagcatgctttgttaaaggcacacctggtccaaccaaccctctctctgtgccctatgtaaatcagacactggctcctcaagctcatctataaaaccaacctcatcttgccccaaatgggggagatccgttcggaacccccctccctctgcatgggagagcttttctcttttgcctattagactttcctctcttaaacacactccttgtgtgttagcgtctttgatttccttgtcatgagacagtgaaccttgggtattaccgcagacaaacgacgccgcttcagaagtgctgggattacaggcatgagccaccacacctagccataatttggtatcttattgccacagagtctgttttgtcagtcatatgatctatttttttttcttgagacagggtcttgctctgtcacccaggctggaatgcagtggtgtcatctcagctcactgcagcctcaacctcctgggctcaagcaatcctcccatctcagccttctgagtagctaggactacaggcaggcaccaccatgcctggctagtttttgtattttttgtagagtcgggttttcaccatgttgcgcaggctggtcttgaactcctgggcttaagtgatcttcctgcctcagcctcccaaagtgctgggactacaggtgtcagcccctgcacctggccatgatctctatttttaacattaatgctggtcatttgtgcctaaactccaaaaagaggtggttataacaaggtatgtctgacctcctttcccattgttgatgaaaaaagccaaactctgtaaaatatttaaagaggtttattccgagccaaatatgagtgaccatggcccgtaacacagcatcaggaggtcctgagaacttgtgcccaaggtagttagattacagcttggttttatacattttaggcctcaaaatgtataaatgtttggggagagggtttcaggtcataggtgaattcaaactgattggcaattggttgctttgcctgaagtgttgaaatcagcataaagaaatgcttgagttgggccgggcgtggtggctcacgcctgtaatgccagcactttgggaggccgacgcgggcggatcacctgaggtcaaaagttcaagaccagcctggccaacatggtgaaaccccatctctactaaaaatacaaaaattacctgggcgtggtggcacatgcctgtaattccagctactcgggaggctgaggcaggagaattggttgaacctgggaggtggaggttgcagtgagccgagatcgtgccattgcactccagcctgggcaacagagcgagaccctgtctcaaaaaaaaaaaaagaaaaaagaagagaaatgcttgagttaagggggtttgtgggagccaaggttcttgttgtatagatgaagcctctaagtaacaggctttagagagaataggtactaaatatctcttacaaggccttaaaagaggcttctggatgagacctactaaggcagggatcctcaatccccgggccatggaccagcaccagtctggaggtgagtggcaggcgaactagcattactctctgagctctgcctcctgttacatcagtggtggtattagattctcatatgagtgtgaaccctattgtgaactgcacatgcaagggatctaggttgtgtgttcctcatgagaatttaatgcctgatgatcggaagtagaacagtttcatcccaaaaccgtccccccacccccagtccatggaaaaattgtcttccatgaaactggtccctggtgtcagaaaggttgggggctactgtagtaagggaagaacattttctttttctttttctttttttttttgagatggagtttcactcttgttgcccaggctggagtggaatggtgtcatctaggctcaccacaacctccgcctcccaggttcaagcggttctcctgcttcagcctccccagtagctgggattacaggcacgcaccaccgcgcctggctaattttgtatttttagtagagacggggtttctccatgttggtcagggtggtctcaaactctcaacctcaagtgatccgcccacctcggcttcctggagtgctgggattacaggcatgggccaccacgtctggcgggaaaaacattttgatagcatgcaaatgtcccctcaaaagatggctttgcagagccatttcaaactatgacaaagaaaatatgttttggggtaaaatcctttgatttccttcagggcctgcagtcatgtgatgctataccagagtcaggttggagttgcgtatcttattgctatgaagaatctgttttgtcagtcttatgatctctattttaatgttaaggctggtcagttgtgcctacacttcgaagagagaaaagtataaggaggcatctctgacccccctttccatcatcgcctgaactagtttttcaggttttctttgtggctcatgtctgtaatcccagcacttcggtaggccaaggtgggaggattgcttgggcctaggagtttgagatcagcctgggcaatatagtgagacccccatctttacaaaaaaaaaaaatttttaagcattatattgatctttagtgacctaaatatcaaagatatttctatttgggggacattgccatcttaaaatattaagtcttttgatccacgaacatgggatagctttccattcctttagatcttttatttcttccaacatttaaaaatagttttcagtatacatcttacatgtctttaatgtatttctaggattgtattcttttctatgccattgtaaatggaattgtgttcttaattttgtgatcatttattgctagcatacataaatatgaatgatttttctgcattgatcttgtatcatgtgaccttgtttaactttattcattctataagattttttttagcagattccttaggattttcattttctttctttctttctttttttttttttttttttgagatggagtctcactcttgtagcccaagctggagtacaatgacaatctcagctcactgcaacctccgtcttccatcagcttcccaaagtgttgggattacaggcgtaagccaccacatctggcctaggattttctatatgtaagatcatatctgctaatagagatagttttactgttccctctccaatctgaatgtccctgcctaattgccctggctaaggcttctagtacaatattgaatagaagtgataagagtagacatccttatcttgttcctaatctttgagggaaaagcattcagtcttttaccatgaagtatggtattaattatgggtttttctttttctttttttctttctttctttttttttttttttttttgagacagagttgctctgtcacccaggctggagtacagtggtgcaatcttggctcactgcaacctctgcctcctgggttcaagtgattcttctgccttagcaggagagttacagggtagctgggattacaaagtacaccaccacgcccagctattttttgtatttttagtagagatgggattttaccatgttggccaggctggtctcgaattcctggcctcaagcagtctgtccaccttgacctcccaaagtgcctggtgtaagccactatgcccagcctttttctctctttattttttatttttttacttagcaacctacttgataaactatgggtttttcaaaaatgccctttatcaggttgaggaagtttatttctattctaactttgtggagtattttaatcatgaaagggtgtttgactttgtcaaaaacttgtgtgtgtgtgtatatgtgtgtatctgttttgggttttgtcctttattctactaatgtagcatattacagcaattcttttcttttctttttatgagatggagtttcactcttgttgcctaggccggagtgcagtggcaccaactctgctcactgcaacctccgcctcccaggttcaagcaattctcctgcctcagccccccgagtacctgggattacaggtgcccaccaccacacctggctaatttttgtatttttagtagagatggggtttcaccatgttggccagactggttttgaactcctgacctcaggtgatccacccgcctcagcctcccaaagtactgggattacaggcatgagccaccatgcccagtccacatcaattattttcaaatgttaaaacaactttgaattcctgggattaggtccatgttagagtatgatcctcttatatgttgctagatttgatttcttgcgctatctttacctggctttgatgcaggtaaataccctgatgtcagggtaatacaggatgcatagagtgaattgagaagcgtttcctcctcttccatgtgttagaagcgttatccaggagagggagatgcacctctgctggaaggaaggacaagtgcagtgggaggaagcagggtaaattggagaacctgaaggaggtccattatgtcagatgcagggacagtgagggggcctgaggtacaagctaaggtggggggatttgggctagagatgtttcttggtggtaattaatgtctcagagaaggaaagggaagggaagggaggggaggggaggggaagggagggggaggggaaggagagggggaggggaagggaaaggaagggaaggaagtgagctttgggccaagtattatttttttttatattttttttttttagatggagtctcgctctgttgtccaggctggagtgcaatggcacgatctcagctcactgcaacctccaccccctgagttcaagtgattctcctgcctcagccttccgagtagctgggattataggtgtctgtcatcatgcctggctaatttttgtatttttagtagagatggggggtttcaccatgttggtcaggctggtctcaaactgctgaccttgtgatccaccaacttcagcctcccaaagtgctgggattacaggtgtgagccactgcacctggccttgggccaagttttaaggaagtccattttgagatggaggataggaacaggcaaagaggtgggaggacgctttgggaaggtcatcctgaaaagaaaagaagtacctgcaagttatgagttgaaatgagccaattgtggggtcttttgagaagtctgtggaggggagaggggactagctatgaggagagcagatgtcaaatgtgtttttttttttttctcatctttcttgacaagtttttttttttttttttttctgagatggagtctcgcactgcccaccgggatagagtgcaatggcgcgatctctgctcactgcaacctccatctcctggcttcaagtgattctcctgcctcagcctcccaagtagctaggattacaggcacccgccaccacgcccagctaattttttgtatttttagtagagacggggttccgttatgttgccaggctggtctcaaactcctgacctcgtgatccgcccacctcggcctcccaaagtgctgggattacaggcatgagccacggtgcccagccgacacctttttttaattaattttttttttgaaagtcttgctctattgcccaggctggagtacagtggtgcaatctcagctcactgcaacctctgcctcttggcttcaagcgattctcatgcctcagcctctccagtagctgggattatgggtgtccacaaccacgcccagataattttttgtatttttactagagatgggatttcaccatgttggcaaggctggtctcgaacttctggccccaagtgatccacccaccttggcctcctaaagtgctgggattacggtctaaaaattttttagacagggtctagctctgctgctcaggctggagtgcagtggcataatcacagctgactgtagcctcgacctcctgagctcaagtgatcctcccacctcagcctcctaagtagctgggagtactggtacttgccaccacgacttgctaattttttttgtttgtttgttttgtagagatggggtttcaccatgttacccaggctggtctcaaattattgggctcaagcaatctacctgccttggcttcccaaattgctaggattgcaggcattagccactgtgcccagccaactttttattttgatataattttatatcttaaaaaaaatgcaagactagtacaaagagttcccaaataatgttttccagattcatcagttatctacacttgcaccatttaaccatttactttatcattctctgtctctgtatttttatacacacacacacacacacacatatacatatacatctatatttgacagtatattgcagacatcatgtctccttatctttaaatatttaagtggcatttccaatgaacatcctcttttttgttgaaaatgggggagatttgggtatgttgaagagtttaagtgaaaggtccagtcgaacagaaaacagagaagggattgttgttgctgaaggcttctggaaaggtctagagagtgggatgtaaaacccaggtgtgtgtgtgtgaggggggcctttgctaggggagggtcagctccgcagttgcaaggagaggtgaagtggagtgcaggtgtgggaggctttgttatgtttgataggggagtttaggaagttcctctctgctggcttctgtatgtgtgtgtgtgtgaattaaggaccaagatgaggccgggcttggtggcttacacctgtaatcccaacactttgggaggctgagacgggtggatcacctaaggtcaggagttcatgaccagcctgaccaacatggcaaaaccctgtctctacttaaaatacaaaaattagtcgggcatggtggcttgcacctgtagtcctggctatccgggaggctgaggcaggagaattgcttgagcccgggaggaggaggttgcagtgagccgagatcatgccactgcactccagcctgggcgacagagcgagactctgtctaaaaaataaaaaaaaaacaacaaggtgattatgaaaaagaggaggaaggtgtgtgagtgttggaggagggtctgcattgaagaagagtggagaaaacatgaagtggtcaaggagaagagaagagacagttacgaaataagcattttagtattcatttagtgagacagcctgtttcaggttgacacttgttcacctagagcacagccaatctgccctgtttggtgactcacatggagagtgaggggtggttgagttcatctaggctggggttttgccaaaggggtgtgatgaaaggacaaaatggggagggggagggaagtttaggacattaacaagattatggatcatagaacgtactggataaggatgaaagaagctgcagccataaaaaacaatgagttcatgtcctttgcagggacatggatgaagctggaagccatcattctcagcaaactaacacaggagcagaaaaccaaacaccacatgttctcactcataagtgggagttgaacagtgagaacacagggacacagggaggggaacatcacacactggggcctgtcaggggttagggtcaaggggaaagagagcattaagacaaatatctaatgcatgcagggcttaaaacctagatgacgggttgataggtgcagtaaaccaccatggcacatgtatacctacataacaaatatgcaccttctgcacatgtatcccaggacttaaagtaaaattaaaaaaaaaaaaaggatgaaagaaacaaaatggcccctggatgggaaacagaggagcaagtgaactagaggcaggctgagaagataggagcctgtaatttgtttcttaatgattactattttacttatcagagctagccatcagtgagccacagatactgtgctaaatatttttcatgtcttaatttcttttttttttttttgagatggaggctcactttgtcgcccaggctggagtgcagtggtgtgatatcggctcactgcaacctccgcttcccaggttcaagtgattctcctgcctcagcctcccaagtagctgggattacaggtgcacgccaccgcgcccagctaatttttgtatttttagtagagatggggttttaccatgttggccaggctgctctcgaactactgacctcaagtcatccacctgcctcggcctaccaaagtgctgagattacaggcatgagccactgcacccggcctcatgtattaatttcatataattcttatgacatctctagaaggtaagtatttttttttcactaaaaattacaggtggctcacacctgtaatcctagcactttgggaggctgaggcaggtagatcacctgaggtcaggagttcaagaccagcctgaccaacatggtgaaacctcatctctactaaaaatataaaatttagatgggtgtggtggtgggcacctgtaatcccagctactcgggaggctgaggcaagagaattgcttgaacctgggaggcagaggttgcagtgagccgagattgcacaacagcctgggtgacagagtgagactctgtctcagaaaaaaaaaaaattcttttatttattgacaccagttttggtttagaaataccttctctctttagatttttcacaacatgcatttaagggaagggaattagaaataaataaataacaagctgatgcctaagtcacttctaaactcaccctagcccgaattaaccccacaggcccactggatctgggaatccagccatactctctgagtgggtaatgatgtagaggggtgagcttttggccaatggcagaaataaaagtgagcaaaccagcaggtacatttaataacaaaaatgttagtctttctcacctgcaggatttggggaccagtgcctgctcaacactttttgggtacttgctgagtcccttggctattgtgggggaggcacttgtcatttcccgccatatgaaggcagcagactgtgaaagagaaagtaaaaatagcaccacaggccaggcgtggtggctcacgtctgtaatcccagcactttgggagactgaggcaggtgggtcacgaggttaggaaacagagaccatcctggccaacatggtgaaactcagtctttactaaaatacaaaaaattagccaggtgtggtagtgcgcgcctgtagtcccagctacttgggaggctgaggcaggggaattgtttgaacctgggaggcggaggttgcagtgagccgagatcgcgccgttgcactctaacctggtgacagagtgagactccgtctcaaaaaaaaaaaaaaaaaaaatagcacctaattgccacaaagaagtgtgtctgtggctgggcacagtggctcacgcctataatcccagcactttgggaggccgaggcaggcggatcacctgaggtcaggagttcgagaccagcctgaccaacacgcagaaaccccgtctctactaaaaacacaaaattatccaggcgtagtggcgcatgcctgtaatcccagctactcagaaggttgaggcaggagaatcgcttgaacctgggaggcggaggttgcgccattgcactccagcctgggcaacaagagcaaaactccatctcaaaaaaaaaaaaaaaaaaaaaagaactgtgcctgtaagataagtattatcattgtaaaaggaaaataaaaagtcaggaccccagttgactctgccaaaaggaacaaattaagctgaaagctgagtcatgcaagaagctgtctttccttttgttcctaagtagaatactacaggtaaaaggttaaatatctccacaggtagctactgtatgttcatcttatcttctgtaaagtgcccatttactgagcatgagaccaatgtgtaattgacgattctcctgcctgttccttttctcttgtgacacatggacaaccatactcttcctctttcccctaagcccacttttcccttttaaatattgaagctctcaaattcatctttggaaaaaggcacagaccaccggcagttcctgtgattctggtttatttcttctggacatgtccttaaagtcagcaaaataaacttctaaactgattgagacctgtctcagatactttttggtttacatcatcaagccattttatagacaaggaaactggccgggcgcaatggctcacgcctgtaatcccagcactttgagaggctgaggtgggtggatcacttgaggtcaggagttcaagaccagcctggtcagcatggtgaaaccccgtctttactaaaaaaaaaaaaaaaaaaaaaaatagaaaaatcagctgggcatggtgacatgcacctgtaatcccagctactcgggagactgaggcaggataattgcttaaacccaggaggcggaggctgctgtgagtcgagatcgtgccactgcactccagcctgggtgacagagcaaggctctgtctcaaaaaaaaaaaaaatatatatatatttatatttatatatatatatatatttttatatatatatattttatatatatatatatttgtgtgtgtgtatatatatatatatatatacatttctttgtctatttatagaacaggttaagtgacttgtccaaagtaacacagctaaaaagtgacagcaggggttcaaacccattctctttaactccacaaatgagtatggttctccaattcatgcttcct[450 bp omitted]tgaaacttttcatgcaaaatatttggagggaagtggctgaatggaagaaaaataagtgaagtgaaatcacttcttatgtgtgcaccttgattgacttgtatttgtaggtctgtaagaatctgtagagtaatagaagaatggctgtctcctcctggtaaacaggtttttatgccctatacttagagacttcttgtgcctgcaacccagggaaccctactctccagtattgaaaaagaatgtttatttatttattattttaattttttttacagacaaggtcttgctatgttgcccaggctggtcttgaactcctggcctcaagcgatcctcccaacttggcctcgcaaagtgctgggactacaggtgtgagccactgtgcgcagaaaaaaaaaagaatatttacaataactttttttcatatttgtttatttatttattttttgagacagagtctcactttgtcacccaggctggagtgcagtggcacgatctcagctcactgcaacctccgcctcctgggttcaagtgattcttctgcctgagcctactgagtagctgggactacaggtgcacgtcaccacacccggctaattttttttgtatttttagtagagacgggggtttcaccatattggccggggtggtctcaaacttctgaccttgtgatccacccacctcagcctcccaaagtgctgggattacaggtgtgagccaccacgccaggccacgtaattaaatcacccttaagagaggaaaataagcacttctagagaaggaagttgaaccacattatcaaaaggtttgggacaaaggataataattacattctacttgctggcccaaggttgttcacaccacaggaagggtttaatctgcctccacttctggttttttacttccgtacaaattcactgagtcccaaataatgtattttatacgcacaaatcctttttttttttttttttttttttttttaagtagaggacagggtttcactatgttggccaggctggtctcaaactcctgacctcacgtgatccacccatctcggggtcccaaagtgctgggattacagacatcagctactgcgcccagctgacatgtcttctttttgtggtccagttcccagtttgtgatgtatttggcatttaagtgattctgaaaacaaagaaaatataggtatcatttcaatgtgctatttgttttcaaaaaggattccattcatttcatattgctgatgacactctcagttgatggttgatttcacggcacctttgcaggcaggcaggatatgccagcatcattcattgacccgtttgttcccttccagaagcctctagagcagagtgttaggtaacatgaagggagaagggggaggacagagttgcctggtgcagaggtgtttgctgaagcttcaggcttggttggctaatatagaacctgtgaaaagacaggatgttcttgcttctttaggaaccttgatcactccattcctttcaagaccaaccagctgatagcttggctcactctcagcctgagcgaatgtgtacaacagcacgtgactgggtgtcctcaaacaaaaagatcttgccaggtctcactgttgatttgttttaatatgtctcctatctttgcctaatcgcatggtagtttaggctgcaatactggggctatgcagacacaggatgctgggaggacttttggctgcgttcatcctagcttggctgctttcgagatgtgtttccctgggcaagtgactttactactctctgtgtctgagtctgactgttaaagagggtactgataggattacctgcctcatagggttgtgacagatgaagctcttagcacaatgcctggcctctaacaagcattcaataaatgggaactactcttatgattacactgctcatgttattctgaaattacttctttttaaaattaattatattttttctcttcttatagcgtcagggtctggctatgttggccaggttggtcttgaactcttggcctcaagcagtcctcccacttctgcctcccaaagtgctaggattacaggcttgagccaccatgcccagtctgaaattacttctttcatgcaaacatatgtttttgagatctttgaagttctgactgtcgttttaacagctgcataggatgccataatttggatattgcctcctctgaaaactgtttcttttcctgtcacctctaacccagttaataaaaaacccagtcaccgaaactgtctctccttgttgactctcagctcctctttaacacatttctccattcacattttcttttcttttcttttcttttctttttgagacagagtctcgctctgtcacccaagctggagtgcagtggcacaatctcgcatcactgtatccccaactgcctggctcaagtgatcatcccatctcagcctcccgagttgctgggactacaggcatgcaccactctgcctggctaacatgtattttttaaatttttaatagatacaaggtcttgctatgttgcccaggctggtctcaaattcttgagcagcaatcctcctgcctcagcctcccaaagtggtgggattacaggtatcagccaccgcgcctggcctctttattcatttattaagttctactctcatttcagttagtaaatctattcttaatctctctgaatctattcttgacccgtgggtccctgacctcattcatgtgctcttcctttcccacccggaccactgcaggcgaatgaattcttgttcatgagattgcctgccaccaggcttaagtgcgacaagtccacctgctacccagctgtcaaatctgcagatctgacctgataactgctctgcatgtgcccatggcactcatgacacctggtgccagctatcataagagttattgatgacagcaacttatgagtcagagagtaatggaggggtagggaacacctagtgtaatgtccaaatgctgaatccactaagccaccttggaggtttccagagcttaattaaagagtctttgtatccaagttgctgatagcagccaggccttcccagagctggctacaggaggagaagggctctgtagccatccagctgagaccacagagtttgtcctttcccgtttactcactgagtgacgaattctttttttttttttttttgagacagagtcttgctttttcacccaggctggagtgcagtggtgtgatctcggctcactgcgacctctgcctcccgggttcaagcaattcttgggcctcaacctcccaagtagctgggattacaggtgtgtgccaccatgcccagctaattttatagttttagtagagaagaggtttcaccatgttggccagactggtctgaaactgctgacctcaggtgatccacccgccttggcctcccaaagtgctgggattacagcacttgagccacaacgcccagccaattcttgacactcactttaaacccctgatacgctgtggcactgtgcttgtccgagctggttcttcctgagtgcacactttcccctagccatggctggcctgccccacgcttggggagaacctcttccagaaagcctcctgccccttctgggctcttctgtcttgactcactgtgttaacaaggtatgtgtctgtgtttgggtcactccaaactaggagggaagggtctgtgacattcacctttgtgttcccagtgcctggcaccaggcctgtcacattaaataattgactgactgcatgtttggtccgtagaggaaaatgcaaatcacctgtaatcatattacccagataactagtgaaattaattcactggatatacccttctagacatttttcctcctagctttatctatctatatttcttacacatacatcttacacatggcattttattttatataatctggatcaaaccctacttaatgttttagaacctttttacattgaatatatcatgtgtgtgtatgcacgtgggcacattggctgggaatcaagcccaggtcaactgcttggaaggcggctatgctcaccacatttaacgtatcatggacagttcttctcatgtaattgtttttttttttttttttggtaagacacaggtctcactctcgtttgggctggagtgcattggcacaatcacagctcactgcagccttgacctcccaggctcaagtgatcctcccaactctgcctcctgagtagctgggactataggcacatgccaccatacttggctaatttttaaaattttttgtaaaaattgggtcttgctatgttgcccaggctggtcttcaactcctgggctcaagagatgcttctgcctcggccccgcaaagtgctggaattacaggcgtgagccactgcacccagccttatcaaatattcttgtaggccttgagttatggtgctgtgtggtatttcattgagagagtgctctctgattgaaccattcccttttctgacatgcagtttattttccagctgaaattattaatgtttcttctctgctgagagcaattctttctcatgatgaagaaaacagggtaaacaaatactgagttaaagaccatcaatagcaggggaaagtacagcagtcctgccttacccttgaggtggactacggaccccccaggggatacccgaaatggcagatggtactgaacccaatatgtactacgttttttcctatgcatatatacatacctatgataaaggttaatttataaattaggcacagtaggagatgaacaacaaaactaataatagaacagttattaaaatatactgtaatataagttatgtgaatgtggtctctctctcaaaatatcttattgtactatagtcacccttctttttgtggtgatgtgagatgatgaaatgcctacgtggctgagcactgtggctcacacctgtaatcccagcactttgggaggctgagacgggtggatcatctgaggtcaggggttcgagaccagcctggccaacatggcaaaactccgtctctactaaaaatacaaaaattagccaggtgtggtggcacatgcctgtaatcccagctgcttgggaggctgaggcaggagaatcgcttgaacccaggaggcggaggttgcagtgagccgagattgtgccattgcactccagcctgggcaacaagagtgaaactccttctcaaaaaaaaaaaaaaaaaaaaaaggaattacctatgtgatgagatgaagagaggtgaatggcgcaggcactgttagtgttcggctactattgactttctgaggttacatcagaaggaggatcctctgcttcaggcaatactggatcattgagccatgaagatctcaatgcttggggatccttgatagtgttttttgatgaaaacttttggaagaacattctaatcagaggttgttgcctttctctaactcaaaagtgttgctgcgaagttgtaggcgattttaagctgcattccatctgaggatcatatgccataattttgtgctttaatgtcagtgcagtttgaaacacttcagcaaattttagtaatgtccacatggctggttctggtttagttttttcttcatcttcctcttcctctgtggaggacatgaaagttcttccagttcctcatttgctaacacttctcaaaggccttcagtatgtccttctatttcatcaagcatatcagcaaatccttctccatcaacttgtcttgttgcatggatgattttcctaattcatctatcaatttcaggcaagcctttaaaatcattcacaacttccactccatcagtccttccagcaggcatttggtttgtggtttaattcatccattgcaacttgatgagtgctattgcatcagcaatagtgaatgatttccagcactacattatttccagtttagggtctgcatccattgctgttgaatgtgatcaaataccaggcagatgtatgtggccttgagaaaatgaatgatgtcctagtcaagcggctgaagcaaaaggttgtatttgcaggtaaaaatacaacctcagcattttcattttcatggcaaacagattcaggatggttaggtacattatctattattaataggtccttaaattccagcccttcctctttcaaatattttttcacttctgggaaccattgatacattggtggaaccactctataaacaagacagctgtcacccatactttctgattatatggctagaacacaagcataaataatttttggttttgcttttgagagcacatgggttctttgctctgtacactatgcttagctttatcatatgccctgcagcgttgccacagagtaccagagttaatctggtactttccagtcttttcatgctttatgccctggtgcttcctttgcacttttatgaatgtaggttctattggtcatcttcttccagaagaggccagttttattgcaattgaagacttgctgtgtatggtatcttttctccttaatctacttcttcaagtctgctaaaaatgttgcagcagcttcttcactggcaaatgcaacctttttagtaatttttatgcttttcagcccaaacctattcttgaatctgtgtaactgtcccttacttgcagtaaatggcttggtgtcacttgtttcaggggatccttgctgatgtctttgtgtaggttctgtgctttctggtacaacacactgctatcagaacacctttctgttcatatcttccacgcacaaatgtaaggcctttttcatcttaactaagcacttatgtactgtggccataactccataacttttttttttttttgagacagagtcttgctctgtagcccaggctggagtgcagtggtgcaatctcggctcactacaacctccgtgtggctataacttttgcagtttgaggtgtgtcagcaagactaacatgaatttctttttccttcttcacaatttcacggatagaagattcattgttacagtagatcttagtagcctaggcatatgatttttttctttgcttattgagttgagaacttttaccttttttttttttttttttttttttttttgagatggaggtttgctcttgttgcccaggctggagtgcaatagcacggtctccgctcactgcaacctccgcttcgcaagttcaagggattctcttgcctctgactcccaagtagctgggattacaggcacccaccaccaagcctggctaaatttttgtatttgtagtagagacagggtttcaccatgttggccaggctggtcttgaactcctgacctcaggtgatccacccacctcagcctcccaaagtgctgggattacaggtatgagccagtgtgcctggccaacttttacctttttgcctaaagaaagtattttgtggcctatctttggcatatctgacttgctggcatcactactcttgtgttttggggccattaataagtaaaataagggttacttgaacacaagcactgtgataccacaacagtccatctggtaactgaaaaggctactgaatgactaaggggcaggtagcatgtacagttcagatacgctggacaggggtaattaatgtcccaggtgggatggagtgggacagcatgagatttcattacaatactcagaatggtgcacaatttgaaatttatgaattgtttatttctggagttttccatgtaatatttttgaaccacagttgggtgagatcaactgaaactgcagagagcaaaatcgcacataaggggggactactgtaaatcattctgatttcactgttgtttgacctttaaaattttttgggtgggtatggtggctcacacctataatcccatcactttgggaggctgaggtgggaggattgcttgagcccaggagttcaagaccagcctgggcaacttagtgagacctgatctctacaaaaataaaaataaaaataaaaaacaaataaaattcttcaagctctgtctccaatgaaggatcctgctatgtggtgccttttgtactgaattgttttcttttttccatggcaggactatggcagccagggacgccacttcaggcagcctgtcagaggagagcagtgctttggacctgccatcagcgtgtgacataagagattacgtcctgcagggacccagccaagaagccaacagcgaggctttcagttctttggaattccattcttttccttattcttctgatgtggatccaggtaataagcagagtttaaaacaaactaacttaaaaacaactagcagcaatacgggtgtgtgatagtttgtttctctctcttccaatagcagatctctgagaatgcttcattgtcttaggcagaaaaacatcttacctaagcaaagctttcaggaggaacttcaaaggacagcttacctggcacagcaatgacaaggagctgtttcctggatgtctttttgttattgttgctgttaatctcaggtctctttctaatctccctcaaaatgaattcagaagcaggggaatatttggttcaacaaagagagagtggaatttttttttgttttgttcttttaaaacttcagaaaatagcaatgtgggcctgttatgtgtgatgagtaataaaaatagagactttagcattccttgtatgaagtatgctgtggatttaagtaacaacctttctacaaggtttcctgactagattgccgaaacatctattatttaaactaatgataattccctgatgtaggtagtggccgtctttagtggtaaagccctctctttcatattaattacctgatctgagtctggaggcccgcagacctggatttatttatttattcatttatttcttgttagttttggttaatcccctgggtttatcacacagacctggatttaaagttcagctctgccacttgctggctatgtgacttggggcgtgttccttaacccctctgagctccagagtcgtctacaaaatggtgatcagaatgcttgctccacccagtcaggtttagcttaaggtaaacctgtaagatacttagcatggtttttctgccatcgatgggtgctcagtcaatgttgttgtcgttaatattaagaaatccaaatggccgggtgtggtagctcacacctgtaatcctaacactttgggaggccgaggcgggtggatcacctaaggtcaggagttcaagaccagcctggccaacatggtgaaaccctgtctctactaaaaatacaaaaattagccaggtgtggtggcgggcgcctgtaataccagctactcgggaggctgaagcaggagaatcgcttgaacccggaaggtggaggttgcagtgagctgagatcgtgccacttcactccagtctgagcgaaagagcaaaactctgtctcaaaacaaaaaacaaaaaacaaacaacaacaaaaaacaaatccaaatatatatttttagaaagaactcattgtgggtactaagcaaatgtaggctttaatgatgatgaattcagtgatgactacaggtaggatgtgtaactgtcattgccttcaagaattctatggagaaatatgtttgggattctctgctgattttcaggacacagagtaatcaggatcagtaagtctcctgtttaatttagtacctgactgtgttagttcattctcacactgctataaagagatacctgagactgggtaatttatagagaaaagaggtttaattggctcacagttctgcaggctgtacgggaagcatagaagcacctgctaggcatcaatcagggcggaaggcaaaggggaagctggcacttcacatggctgaagcaggaggaagaaagagagggggaaggtgctacacacttttaaacaaccagatctcatgggaactcagcaccaaggggatggtgctgtaaaccaattaggaggaactgccccatgaaccaatcacctcccaccaggccccacttccaacactggggatgacaattccacatgacatttcggcagggacacaaatccaaaccatatcactgaccaagaattagataattctttatccttttcctttctagacttaacatcttagttcctttaaccttcccttttttccctgccatcctgctgcctctacatgactttccatccctaaaactgattttgttcatcatccctgggtagcaacagcatttcttagaatgagtgaatggaggcagttgaacagaactttgtttgtgtatgtatttatttatttagagacagggttttgctctgtgcctaggctggaatactgtggtgccatcatagctcactgcagccttgaactcctgagctgaagctatcctcctgcctcagcctcccaagtagctgggattacaggctcacatcaccatacatggcttttttttttttaatttttttgtagagacagggtcttgctgtgttgcccaggcaagtctcgaactcttggcctcaagtgatcctcccaccatggcctcccaaagtgctgggataatgggagtgagcaaccatatccagtttgaacagaactttagaagtattagcatgttgaaatacttcaaggcaatggctctattcccttagggaattcagtgtggactcagtttttactttttattgcctgttagttgactaatctgtagaaaagcaactgttattaattggaattggttgacagctctaaaaataaggagcatgttgaaatatttatgtaggggtatttgttaaaaatatggatattctatgccaaaaaggttgtttggggaacccatgtctaaacatgggaaggggtactcaaacgctaagacaaccattttacacggtagtagtggtggtcgtgctggattagacagcctggttggaattctggttctgcttcttcccctggtttgactttgggcgagccacttagcccctctgtacctgtctccttatttgtaaaatggagatgataacagcacctccttgttggggaggttataaggttgtacaaggtagtgcatgaggcatagtgtgtggcagggagtggactctcaggagatccaattcctcatcagctggggtgcttagcacactgcagtactgcctggtcagctcaggattttttttttttttttttttttgagatggagtctcgctctgtcacccaggctagagcacagtggcgtgatcttggctcactgcaacctccacctcccaggttcaagcaattctcctgtctcagcctcccaagtagctggaattacaggtgagcgcaaccacacctggctaatttttgtgtttttagtagagacggggttcaccatgttggccaggctggtcttgaactcctgacctcaagtgatccacccgctgtggtcatcccaggcatgagccactgctctgggattacaggcgtgagccactgcgcccagccagctcaggcttttatcacaaataccatacactgggtggcttctcacagctccagaggctggaaagtctaaggtcaaggtgccagcagatttggtgtctggtgctgtccctgttcttgatttgtagacagccaccgtcttcctgtgtcctcatatggcctagagagagagcctctttctcatgtctcttataagggcactaatgccatcatgaggcttccaccctcaaaacttaattacctctagctgggcacagtggctcatgcctgtaatcccagcactttgggaggccgaggcgggtgcatcgcctgaggtcaggggttctagaccagcctggccaacatggtaaaaccctgtctctaataaaaatacaaaaattagccgggcgtggtggcaggcgcctgtaatcccagatactcgggggcctgaggcaggagaatcacttgaacccaggaggtggaggttgtagtgagccaagaccgcaccattgcactccagccccggcaacagagcaagactccgactcaaaaataataataataataaataagtaagcataaaaaaaaagcattcacattggtttactcatcctaccccatggaaggctctgggtgtgataattgctctctgcatactccacactgcagtgttttagggcacattaatagtgatcactcccatttattgagcatttactacctgtcaggttttatactgtcaggctccatgctaaatatttcacaaacatcatcactttttttttttcttttcaagacagagtctcactctgttgcccaggctgagtgcagtggcacaatctcggctcactgcaacctccacctccctggttaaagcaattctcctgcctcagcctcctgagtagctgggattacaggcgtgcaccaccatgcccagctaatatttatatttttagtagagatgaggtttcaccatgttggcaaggctggtcttgaactcctgacctcaagtgatccacctgcctcagcctcccaaagtgttgggattacaggtgtgagccaccacacccagcccaaacatcaccacttttaattcttatcacatacctgagaagtggaaatcattcccatttaataagtgaggaaacaaacttggaaaagttaggaaactttcccagtgtcacttagcaaatgacagagctgactgaatccaaaggaaatgtttcactttttttttctttttcgaggtatgatcctgctttgttgcccaggctgaagtgcagtattgtggttcccctggactcaagcaatcttcccttctcagcctctgaagtagttaagactataggcgtgtgttatcctgcctagctaattaaaaaaaattttattttttttttttgtttagagatgagatctcactatgttgcccaggctggtcttgaactcctgggcccaagcgatcctcccgcctcaacctctcagtgttgggattacaggcatgagccaccacacccagctaaaatcacattgttattggaagaaaaagaaagctttttctaacctgggaagtgaccaagaggatgataccactgagacaaggaactgctgcaaataaatttaggcaagttttgttaacttgatagaacaaacactttggagaggtggaaggagttttagggaggaatattaactttttgatactattttattcaaacttaaacattttaaaacaatttttattttgctgtgcactctgcaattctgtagtacttttatatgttttgccacaatacccactaggtttgtttttaaaaaggaccagggctgtgagtggtggctcatgcctgttatctggcatatctggtatattatgaggctgaggcaggaggatccctttttcttttttttttttttttttttgagacagagtctcgttctgtcgcccaggctggagtgcagtggcgcgatctcggctcactgcaagctccgcctcctgggttcacgccattctcctgcgtcagcctcccaagtagctaggactacaggtgcccaccaccatgcctggctagtttttttttttttttttgtatttttagtagagatgaggtttcaccgtgttagccaggatggtctcgatctcctgaccttgtgatccgcttgagaggatcccttgagttcaggagtttgagaccagcctggacaacgtagcaaaaccctgtctctactaaaaaaaaatttaaaaattagccgggtgtggtggtacacacctgtggttccagctactctggaggctgaggtgggagaatcacttgagcctgggaggtggaggttgcagtgagccatgatcgtgctactgcaccccaacctgggcgacagagcaagaccttgtcaaaaaaaaaaaaaaaaataaggaccagatcacccagagcttcccaagaactaagtgagaatggtatctttcagccatgacaggagcagggaatacactagaatcaaatggaagcccagccgttctgttatttaataacaccatctctagtagatcaccctaagcagaaataaacgtgctcaggtttatctatcacaaagagaacttcattttaacatcactaggagacttttacacagcatggaaggctgttgatttttctgtaaacattccagagctaccttttgtgagaaattatctacaaaagtcagttaggaggccagatgcagtggctcatgcctgtaatcccagcactttgggagggcgaagcaggtgtatcgcttgaggccagaaattcaagaccagcctggacaacatggtgaaatctcatctctactaaaaatacaaaaatcagccaggcatggtggtgggcacctgtaatcccagctactgggaggctgaggcatgagaatcacttgaacctgggaggtggaggctgcagtgagccaagatgacactactgcactctagtctgggcaacagagtgagactctgtctaaaaaaaaaaaaaaaagtcagttaggagaggttatcactggtaatcttgctgttaccaagcaatgaacttgaggtgacagccttaaactctgaaggaggtcactgccctaacagcccaacctggtttactccgacctaaccattttccaccttaagtttcagaattgtccaggggcctgggtttttcatttataagttgagtccattttcttttccatgcctcttgttcataggtagctgtagttacgggttctctccccatggcccttcaggaggctcttgccgacattttaatctaattctgatgactctggatctattgtttgctcagagacatgcccacctttacactaatctctactgggccaccattctatctcagattcttaacacctccagttcccaagccagtttgatgttctctcttgcttacttgctgttatgtgttgtaaggaagttgatcttccagggattgggaaatatagccaaggtttccagttggagggtcattcagggtgactcaccattggtctctgcccatcctggtatttactcagtgaggcacacactgttggctaccttcatgtagcttgtgcttggctcaaaatagagttgactatctcaagaactggcagagtatggcaggttgcttacagctgaatggggggtctaagggtgaacttgggacctggctcccccagctactgggtgaaatagagccaagctttggtcattaggattcattaacttggcatagtttttacaatttctgtttttttttttttttttttttttggagacagagtcttgctctgtcacccaggctggagtgcagtggtgcaatctcagctcactgcaacctctgcttcccaggctcaagtgattctcatgcctcagcctccctagtagctgggattacaggggtgcaccaccacacccagctaatttttgtatttttagtggagacaaggttttgccatgttggccagtctggtctcaaactcctggcctcaagtgatttgcccacctcagcctcccaaagtgctgaattacaggtgtgagccagtgcacccggcttgactgtaagagttcagtcatatcatctgttatcaaattcttcagtcaaaatccagacacagagttggcaaggggttggggttcacagtggaggcgtggcgtagtcttctggtggcacagcacagcccagcaacaggcacgctggagagaatacccagaaatccaggcaggtggcaggcagtgtgcaggtgccttctcagtgagtagcaaggtcccagcttccaggttggagtcagtgtcacagttctaacccctggaagagtagtaggccaaggaagggtgaccttagatttaggatatagcaaggaccgctgcaaaacccagttacaagaacatgggcccaggcttaggcttaacttgtgtaaaggattccccatttcaccttgcagctgcccctgaccatgggcctatccctgccctgcttttcccagccaggctttttgaaggggctgcctgccttcctcctcacttcttcatctcaggattgctcctcattcccaggcacatggcctctacctccattcccctctggactaagcctgcccttactcagatgccaatgatcttccctaggagccaaactggatggacgcttctctgtccttttgctatgtgcccaactgccgcatcactgttcatactctggaggagcaaattagtagcaaggacatgagacttaagagcactttccagaaaactactgggctgataagaatctgagagtgttagaaaaacctcaaaagccttagtcattccagtatgagtatgtaaagatgggtaaaactaggctatatatgtctaataaagacacagtccatctggcctgaagttcccacccagccactcctcatgaaatgatggtaaaataaacaacttttcacttaaagcaggtgcaggattataaaatcctcccctcagcccttcctagtgagatatggcagaagacctgctactgccaaacagggcttcctgagagcgagtgcagaggctcatgcctataatcccagcactttgggaggtcaaggtgggaggattgcttgagcccaggagttcgaggctacagtgagctatgattgtaccactgcactctagcctgcgggacagagtgagaccctctttctaaagaaagaaaaatatagagtgttcctggaacaccttttccataacattcttctgtttaggtccctttgagatgtcatattacactacttttgtctttagactgagtctcgctctgttgtccaggctggagtgcaatggtgcaatctcggctccctgcaacctccgcctcctgggttcaagcgattctcctgcctcagcctcctgagtagctgggattacaggcacccaccaccctgcccagctatttttttgtatttttagtagagacagggtttcaccatgttggccaggctggtcttgaactcctgacctcaagtcatccgtccaccttggcctcccgaagtgttcggattacaggtgtgagctaccacacccggccaatcttacactacttctttccttccagctccaatcaaaaagctcctctgccttgttttcgggactctgtgtaatctgctgcctggaatatttgttcaaaatatttaataaccaatacagcagtattgcaatatttcaacaaccggcacgactgtacaggtgcacacgagctgaatagaggcccctgctgctgtccaactgcacattaacacaggcctgccagtcctgtcgggcttgcttttaggctgagccaactgttaatgtcttagctgcattgttcccctctctggaatgtgccccctcctccctggtcaactccagtccactccagagatggctgaattgaatccattaattagtcccaggtacagacttgctgctggacttgaacaccctgtctgttagatacttgttttctttctcgtttgctgcttggctcaagggaagcacagagtatacagaatggaagagcggagttaagaaacagatgatcttggttaaacctctcaaaagcaagatcacaaaggtcacccgaaggcccagtcccacatgtactgctagagcttgataaactctgggtagctcatgtggcgtatctcacctgcaccctctggaacctttgtcctggagagcatccaaggtactttctaatataggacaaggagttttctctgaagtcgttgttagacattaacaatacagatgtaggaaatatcagccctttcctcaaacttgaacttctgcctaagagcagtgtcggggaaattggttgcatgtagacagcaaattgaatgttaaacacaataagtctttgatgattaaaggccatagctggcaggcagttataagtttaaagtaaatagtgatttaatgcacctttagtcttattctgggaatctgtcaacatcccactcttcaaagcccattttgtaacttgtgtatttaggcatttcatccaaggaatttagtatttaagagtaaaaaaaagtttgttgtcttcctctctataattcatatttctttggaattctataaaattttatttccaaaaggaatgaattataagctcttagataaaaaaactcaaaataaaatttatatactagttgtcaaattcttgatgtgttgttgtagttttaaaataggagtcagggtatattttagatatatacataaaatgctaaagacattttatagttgcattaagtgatatccaacctagtggctaatacccagtcactagaccaaacctgagatacagagagtatggagaggaaaggaaagaagggaacaatggttattgaaccaattctctgagaaataactgaggacacaattgggtacattttatcagataccaagtagatgggctttatttggaaggtttgggtattctgtgtggcagtgcttctctgcttttgttgcctcttcctagatttggggtttttgttgttgttgttgttttgagacagagtctcactccatcacccaggctggagtgcagtggcaaggtctcggctcactgcgacctccgcctcccagtttcaaggattctcctgcctcagcctcccgagtagctggcactacaggagcccgccaccacacccggctaatttttgtatttttagtagagacaaggtttcaccatgttggccaggctggtctcaaacccctgacctcagttgatccacctaccttggcctcccaaagtgctgggattataggcgagagccaccatgcccagcctcctagattgagttatgcagattcagctatctagactggattttcagctccagaatcggattttgagctctttgcatgctgctgttagaaggcagcagtgaattttaattgtatggcctgaggcgtgaaggataaaccataagtgtatatgactgaggctcacagagttagagaaggttacagtctccgagctggtggttcctcacagctctttaggaactacaagtttgagattgagtggggtcatgagcttgtggggccctggatgctctaccttatgcatccaggcaggcattcatccaaagaaagggtgccagaaccaggaggagttcgaaaaccactaagcggccgggtgcggtggctcacgcctgtaatcccagcactttgggaggccgaggctggtggatcacttgaagccaggagtttgagaccagcctggtcaacatggcaaaacgccgtctctactaaaaatacaaaaattagccaggttggtggtgtgagcctgtaattccagctactcaggaggctgaggcaggagaattgcttgaacccgggaggcggaggttgcagtgagccgagatggcgccacgggcactccagcctgggcgacaaagtgagactgtcttaaaaaaaaaaaaaagaaaaaagaaaaccacagagcccagctaatcctctcattttccacatggggaagttgaatcccaggataatgaagaaaatcacccaaggccatgtagtaacctggcaactcctattttctgggtgaccctctgtgcagactaactgtaacttctctatcccttctttaaaactaaaaaagtatagttctctataactttcgatatgtactgctaaattatgtgtcacattaaatagtcactggagaggataataatagaattattttatttatttatttatttttaattttttttattttatttttgagttggagtctcctctgctgtccaggctggagtgcagtggcgcgatctcggctcactgcaagctccgcctcccgggttcacgccattctcctgcctcagcctcccgagtagctgggactacaggcgcccgccaccacgcccggctaattttttatatttttagtagagacggggtttcaccgtgttagccaggttggtctcgatcgcctgaccttgtgatccgcccgcctcagcctcccaaagtgctgggattacaggcgtgagccaccgcgcccggcccagaattatttttaaaagctcaagaatgttatttgccacctgtgacatctctcgttgttcctcactcttaagtttcaagggcacgtgctatgggggaagaggcttatttacttctgtgtactttgcctgcagtcacagttttaaaaagaaatcccaactgagttgaaaaactggccatgttactgtctcaagccacacctccggggcacttatctgccgagtccaggtgcacagcagtgtgacctcatgttctggcctgatagctcctctcaagggcttcttcaagtaagcattcatctgactttttactcagctatgtcttcttaaaatacaaggaaacaacttgattacaatagtcaatcccaaagaccgtaggccataagacccccatttcaaacagacaccgtcactagtttcattcattgttatgtatttatgagataaaggctatacacaagggaagaccaaaagatggctggtttttccatttgttgtgcacttacatttcaggcactgtgctatgcatttcacacacgttgttcttttgattctcacagccacacccaagaagtaaatcctattatgatctccttgttactcatgaggaaacagttttagagaggctcgtttcatattaatgttacccacagactggtggaaatctgagactcaaacctgggtcaggttgactgcaaaggcagacctttaaagaaatgcagacatctaggtatgattacatactatgcattaagaattaagctttaggccaggcacgatgtctcacgcctgtaatcccagcactttgggaggccaaagtgggcggatcacctgaggtcaggagttcgagaccagcctggccaacacagtgaaaccccgtctctactaaaaatacaaaaattagctgggcatggtggtacacgcctgtagtctcagctactcgggaggctgagacaggagaattgcttgaacccgggagacagaggttgcagtgagccgagactgtgccactgcactccagcctgggtaacagagtaagactccgtctccaaaaaaaaaaaaaaaaagctttaaatatgcagttacttctttaagtctgagctagcatctttctactaagtcagtatcttcaagccgatattggtaccctgtcagggtgactgtgactcctggtccactggaccagcattgtgtccactcttcactgtgctctcctttccatttctcccatcttcctgttgtggaagaagcttgaactacttgtgcactaattggagagaaggtgttggggctcagaaagcagtaccccaaaatgaaggtctctgcagcagcctcagaagcaaaagttttcctttgacctttgtctgccctcttgtctgagtctcattctccacccaaggccagccatagaagctagaatccctcttccccaaggtgggtcatagaaaccagaaccccctttctccaaaccagccatagaacctaaaaatattactctaattttccctctgcctttctgggtaaaacttggccataaagaaattatctggctgggtgcagtggctcacccttgtgatcccagcactttgggaagccgagacgggaggttcgcttgaagccaggagttcgagaccagcctggccaacatagcaagacctcgcctctacaaataaaataaattaactgggcatggtagcatgcacctacagtcccaggtacttaggaggctgaggtgggaggattgcttgagcgcaggaggttggggctacagtaagctacagtcgtgccactgcactttaacctgagtgacagaatgagacctcatctcttttaaattaaaaaaaaaaagaaaagaaaaattatctgacctactttgtttgactgtaggtgataagacccccatttcagagaaggtcctgtcccatgccctgaaggaaggagcgctgctcagagaggccaagaagaatctagacagacaggccttgctgggctccccactgaatctattaacattagatcttaccttttttgttcaatcatatttctacactttgattcccctttcccagtgcctcccatctgccccagtgaatatgggcagggaaggggaatctctgccccaggaagacaaaaaggcttctcaagccagatcatttgatcatttgttgaattggcaggatcctctcatgtgtgcctcctgaccacactgctatttctgctgttgtagaaatatgaaggtcttatttctacaacaaagtccatagtttattgaacctaagcataaaaatggacaatttcccctgtatctttgggtttgcattctgaaggcttcagtgcatacacattaaataaatttgtatgcctttctcccatcaatcaatctgcctcatgtcagtgattttcaacaaacctccagggggccaagggccttggtccccacaaaggcattgccttctcagttaaatttctcacaccaggtaggatccaacttcttatgtgaaaacccagggaagaaaacaagtcaggaattttaactccctttgctggaatcaatgaagcccttgatcactttttctacccagaagaaattttctcatctggtgccagaactcttcttattcttggctctttgcccttgaagttgctgtttgtctgctgagtggctgcccttggccaaccttttagctccctggagtttttgatagttggcttttggtaacatgcttgaagttacaaaaacccagcttattagaacataacttttaaggataaaggcttttatgttaattcctgggtcccccatgtttgactgaccaggttcatgttttgcccactgcctggcctaatcacacaatgcctgcagcttctgcctgctacgcctagaccctggtgtgagtagggaataagggtcagtcagttcctggcacatggtaggtgctcagtaaaggctggtgaatgaataaatgaaaaacacatataagtgaaacttgataaggtttaaaaatggagatcaagtatttatcacggtgccctgctcatccatttgtaaaattatcataaaatttaaagctctgtgtgatctgtgtaggataatataacatttctaagttaaaagcatatattattacataagccctgcagatttgtttaactcttgactagaaagtcaactagtctctctcaaaagcccctggctttttttccttgaaaagaaaacaagtagagaaatgaacagctgtaaggagatatagtgctactgagaatagaatgttattcctacatttccccatcatgaagaaagcatgttcctagtggagttgtttcttttttagcaaatatttctgtaataaccatgtatgcaattatggctttaaggatacccctaaattgctttcaaagctattttcttaagaaaactgtattccatattttaagtatgtgaggtttttttccttcttaaaaataatacaattgaggggcaaatttaaataaattgtaaaaaacaaaaaaacagaggtgtacccccatttcttcctagtatattcagtagttgttgttttgtccagaattttcttttacaaattggaaaatattagggattgtaaaatgcagtataaataagatgaggaagtgaccctcagactaacaccattttagaagttgagtttgaggaaaaatggttaaaataatattgcatgttttcagccaataatacccagagagctgctgctctgagcctaggcctggaggtggtgcctggcgagttcttgctatcagacagtgtttgagtctactgccctctggtggctacttgttacactttcctgagccttactgagaaaaagaatttaaacgtaccagatgtgtgttaaacctttctcatttgttctttgcagagttctgtgcctactcgaggtagaattaaaagttctcagagattattttactcaactgaaatccaaggaggtaatttctcttaaggtcaccactgttagttatattcactgcacatgaattatataatttgaaatcttttttcatttatccagctgggttgatttcaggctagaatacacacatgaatagtgatgtctaattttttttgctgggctcagtggctcatgcctgtaatcccagcactttgggaggctgaggcaggtggatcacttgagatcaggagatcgagaccagattggccaccatggtaaaaaccctgtctctactaaaaatacaaaaaattatctgggcatagtggcacgcacctgtaatcccagctacttgggaggctgaggcatgagattcacttgaacccagaaggttgcagtgagctgagatcgagccactgcactccagcctgggagacagagagagtgagactgtctcaaaaacaaaaaaacaaaaaagaagaaaagaaaaagtgatgtctgatttttctttatacgtttgccaataaaagttgtgcttttttttttttttttggcaaagataagaccaaaggatttaaattttacttttttgatgaaattatagtaccattaaagggtaattggccaggtgcagtggctcacacctgtaatcccaacactttgggaggccaaggtgggcagatcacctaaggtcaagagtttgagaccagcctggccaacatggtgaaaccctgtctctactaaagatacaaaaattagctgggcgtggtggtgggcacctgtaatcccagctactagggaggctgaggcaggagaatcacttgaacccaggaggcagaggttgcagtgagctgagattgtgccattgcactccagcctgggtgacaagagcaaaacttgatctaaaaaaaaaaaaaaaaaagtaatcacaaaattgagaaaaaaaaaacttttggaacttgtaatctaataagatggcatgaaactatttctccttgttcttccctgctaagcaactatgaaccctggaaatgcaagaggcaaccaaaggagaacttggagatttagtaagaaggtgaattagtttggggccccaggactggaggaacaatatggtgtccgagtgtcttctgtcctcctacccaactgaagaaggtgacccagacccagtgcatcctaacctgcaacctagcaacaagaaggtggcccgggaccttctccccaggactgacagattatctatccaacatgaccaggaaagcccagcccccgggaaggggagattaataggaggccactaagtagccagaggaagtgctcaccttcagagggcctgggacttccttcccctgctgagtgagagctctgtggcaagcatgcacatgtgggaggattctgccagttcaacaaatgatctggcctgggaagcctctttgttcccctgggccagagcctccctcccctgcctacattcactggggagctggggggcactggcagaggggatcccactacctcagacagcccaacccagggaccttcttcctcccagggagcctgaaacttccttcctcccctagagattcccatactctgagcatgaggcctgggaaaacatcttccattccttcaggcagcactagcaggagcctgtggaaactcagcagttccagataaaccaaacagatcaaaaacagcaaaagcactgaaaattaaactttcattgaaaccacaatcacaaaagtaggccaggacctgcatgctaacataaaggatttctttttttttttttttttttgagttggagtctcactgtttcaccgaggctggagtgcaatggtgcgatctcggctcactgcaaactccgccccctgggttcaagctattctcccgcctcagcctcctgagaagctgggattacaggcacctgcctccatgcccggctatttttttgtatttttagtagagacggggtttcaccgtgttggccaggctggtcttgaactcctgacctcaggtgatccacccaccttggcctcccaaagtgctgggattacaggtgtgagccaccacgcctggccaaaataaaagatttcagtaggaccaaaattctctaaatgtaatagacaaaatgtttagatacaactaaagatcacttgtcataccaagaaccaaaaaattacgacttgaatgaaaaaagacagtcatggctgagcgcggtggctcacgcctgtactcccagcactttgggaggctgaggcaggtggatcacttgaggccaggagtttgagaccacgttggatgatatagtaagaccctgtctctacaaaaaataaaaaaatttgccaggcagggtggcacgcacttttagtcctagctacttgggaggctgaggcaagaggatcgcctgatcccaggagttcaaagctgcagtgggctgtgattgtgccactatatgccatcttgagcaacagagaaataccttatttgacaaggattttaaagcagccattataaaaatgcctgaacaatcaattataagttctcttgaaataatgaaaaaacagaaaatcttagcaaataaataaaagttataaaaagaagcaagtcagttgggcacagtggcttccacctgtaatcctagcactctgggaggctgaggcagtagatggcttgagcccaggagttcaagaccagtctgggtaacatggcgaaacctcgtctctacaaaaaatacaaaaattagctgggtgtgatggggcactcatgtagtcccagctacttcgggaactgagctgggaggatcgctattgtcctggaggtcgaggctgcagtgagccataattgcaccactgcactccagcgtggaccacaaagcaagaccctgtctcaaaaaaaaaaaaaaaaaaaaaaggaaatgatataaatgatagaactgaaaaatatagccaaacattgataaattggacctcataaaaattaaaaacctttgctttgtgaaagcccatgtgaagagaatgaaaagacaggccacagactgggagaaaatatttgcaaatcccatacctgacaaagaactagtttctacaatatgtaaagaactctcaaaactcgactctcaaaaaaaaatgcagttcacttttacaggtcaatacacaattcagtttctccacatccttgccaacaacacttgttattttctgcttttttgatagtgaccatcctaatgggtgtgaggtgatatctcactctggttttgacttgcacttttctgatgattggtaacgttgaacatattttccacatgtttattggccatttgcataccatctttgaagaaacatctattgaaatcctttgcctatttttaaaattgggttgattttttttgttattgagttgtaggagttctttatgtattctagatactaacttcttatcagatatgtgatttgcaaatattttcttcctttttatagatggccttttcactctgttgattatgtcctttgatgtgcaaaagtttttgagtttgtccatttttgcttttgtttcctgtactttcggtgtcatgtctaagaaatcattgccaagtctaatgtcatgaagcttttcctctgtgctttcttctaggagttttatagttttagggcttatgtttaggtctttaatccatttttgaattaatttttgtatattgtgtaagataaggttttgagtttgttctttttatctttttgtttgtttgtttgtttttgtttttttgagacagagtctcactgtatccctcaggctgaagtacagtggcatgatctcggcttactgcaacctctgcttcctgggttcaagcgattctcatgcctcagtcccccaaatagctgggattacacgtgtgtgccaccacgcctggctaatttttgaatttttagtagagacagagtttcaccatgttggccaggctggtctcgaactcctgacctcaggtgatctgccgttttcttttttttaaaaaaaaaaaagaaaaagagtcttggtctgttgcccaggctggagtccagtggcatgatcccggctcactgtagcctctggctcctgggttcaagagattcatgtgcctcagcctcccgagtagctgggattacaggcgtgcgccaatatgcctggctgattttttgtatttttagtagagacggggtttcatcatgttggccaggctggtctcgaactcccgatgtcaagtgatctgcccacctcggcctcccaaactgctgagatcacaggcatgagccaccacgcctggcctcgactttgttcttttgcatgtggatatgctgttttcccctcaccatttgttggagagaccttcttttccctattgagtagtcttggcacccttgtcaaagatcatttgagcatatacgtaagggtttatttctgggtctttgtcctgttccattggtccgtatgtctgtctttatgacagtgccacactgttttgattactgtagctatgttttgaatcaggaagtgtgggtcctccaactttttttttcctcggaattgtttttgctatttggaggtctgtatgtattcttttttgatgtacctataaatatattttagtgtggataaatatgtgcatgtaaatttatgtattttagtgcatttgtttatgtagagattttaacaacaaaaaacctgtaacaaaaacatgctgttctgcaacttgccttttaaaattccacattaggccaggcacagtggctcacgttgtgggttttttttgatgtatagagattttagattcctatatagtcaagcttatcaatcaatgcttctgctttagcataaaattaggaaaaccattcttgctttccaagattatataaataggcacctccatttcttagtatttttaaaagtttaattttcaactttgaagtctttattttagggtaaagtatgaaacaagatgatagctctattgttttccaaatggaagccagttgtctcaatgttatttatttaatcattgtattcctttctctctggtattttttttctttcacttttgttgcccaggctggagtgcagtgacacgatctcggctcacttcaaccttcgtccctggttcaagtgattctcctgcctcatcctcctgagtagatgggattataagcacatgccaccgtgcctggctaatttttttgtattttcagtagagacagggtttcaccatgttggccaggctggtcttgaactcctgacttcaggtgatctgcccacatcagcctcccaaagtgctgggattacaggcctgagccaccacgccaggcccctttctctctggttttagatgttcccctcacttaaaaaaaaaaatcacgttctacattttctgattgtttgtttgttttggagcctgactggtctgagttttcaccttgattctatagctagctaaacatgctagctttctgaccttgagcaagtgactgcacttcactctttcttagtttcctcatctataagatgaggacaataacactatctgcttcataggttgtcatgaggattgagtgagacacctggagctgagtagacttagcaaaggctagctgtcattaccaccactgctgttacaactagtgctgctactggggttggtttctggattcacttctttcttgagttcctttcaggagtctaagacttccacttctttatgttgctcagtacgaggcaaaaaagtgacttttcctgggacaggccccttacagagaagttattcggattaacactgaccaaaagtatctatagaattacttcttagcatttgctatgaaaatatatattttctgctaactttggatataattttaggcaaattattgcatcctgttcttatataatctcttcattgtgagtgtcatgtatatttgtcaacagatgccttcttatttgcaaagtgctttgatttgtatttgaaaggtgttcctatgttgtattctacaaatagtcttatggtgaaggatccctgttaatctggggtgtctttaagcaaagccatgtttgtgagactgtattagatactatgtttattagacgtctaatcagtgaaatgaatgagaccatttttaaaattgttttctctgtaccgtgctacagattgagggtgatataaatcagtgagaacacaggattcctgtgctcatggagttgatcgtctagttgggaaaataagatatgtaaacttatttgtttacatatgtaaacaaagtgatggccgagcttggtggctcacacctgtaatcccagcactttgggagaccaaggtgggcagatcatctgaggtcaggagttcgggaccagcctggccaacatggtgaaactctgtctctactaaaaattcaaaaattagccaggcgtggtggcacacacctgtaatcccagctactcggggggctgaggcacaagaatcacttgaacccaggaagcagaggttgcagtaagccgagatcacaccactgtacttcagcctgagggatagagtgagactctgtctcaaaaaaaacaaaaacaaaacaaaacaaaaaacacacacacacacgcaaaaccaaagtgataaaatcaggctgtataggctgggcatggtggctaatccctgtaatcccagcattttgggaagccaaggtgggcagatcacttgaagtcaggagttcaagactagcctggccaatatggcaaaacccccctctgtactaaaaatacaaaaaattagctggatgtggtggcacgtgcctgtaatcccagctacttgggaggctgaggcaggagaattgcttgaacccgggaggcagaggttgcagtgagctgagatcatgccactgcactccagcctgggtgacagagcaagactctggtctcgcaaaaaaaaaaaaaaaaaaaaaaatcaggctgtgtaagtttcataactacacagaacaaatagaaatgaacaaactcattacaaaaaatatcatctattggccgggtgtggtggctcatgcctgtaatcccagcactttgggaggccgaggcaggtggatcacgaggtcaggagatcgagaccatcctggctaacacggtgaaaccccgtctctactaaaaatacaaaaaaaaaattagccgggtttggtggcgggcacctgtagtcccagctactcgggaggctgaggcaggagaatggcatgaacccagaacccgggaggcagagcttgcagtgagccgagatcgcaccactgcactccagcctgggcaacagagcgagactctgtctcaaaaaaaaaaaagaaagaaagaaaatatcatctattccggaacagtagatatctacttatttctccacatcagaattctctatgtaaagattagctgttgaagctattacattctgggtggtgctagaaatcattacttaaggaatagaaattagaatgttgttatacatttaccaaagcaaaagagcaataatccaaattttaatcagatcttagaggaaacatttttatagctgtttattacaagacctcagagttttcttactgtgagcactctcaaaattatctaaagtatttttttaattgaactattggtcatagttattaatgttattaatatattactataaaaaggcatagaaaaatcataataagaaacagataattgctaaactatgatttgagttgcccctctagagttttttcttttgtggtctatgtgaaaggcaccctatggttttccattgctttatctcttttttaaaacccatagcgaattccctaaatttgaatttgaaacattttcagcgtgagttagaaaggggggagatgaggccgggcgcagtggctcatgcctgtaattccagctctttgggaggctaaggcgggtggatcacttgagtctaggagtttgagaccagcctgggcaacatggagaaaccccatctctacaaaaaaatacaaaaaattagccaggcagagtggcatgcgcatatagtgccagctactctagaggctgaggtggaaggattgcttgagcccaagaggcggaggttgcagtgagccataattgcaccactgcactccagcctggacaacaggacaagaccctgtctcagaaaaaaaaaaaaaaaaaggtggagaggtgagttaaaggataattggctgcagttttacagtctacagttttagactgtaaatcggcatatcacttttcaaatattaactcaaccttcaacaggcatgagaagctgaagttgtttctaactagccaggaaaatgagaagtattattgcatatctctcagcatattaggaagaattggaagaaaaacagacccagagctctggattctatcttttgctccaaagtaatgataggaagctttattcatctaacaatggatgctgtgattttaaaaatttaaaactactcttcttgatgaaataaggaaaaacaaaagggggaaggaaaggaattaggaaaggaaagagggagaggggagcaagggagtgattagtatgcttacattttatactcttgtgaggattaagaataatgtgtgtgggctgggcacagtggctcatgcctgtaatcccaacactttgggagcctgagttaggaggatggcttgagctctggagttcaagatcagcctgggcaacatagtgagaccccatctctacaaaatataaacaaaataagctgggcatggtgacgagtgcctgtagtcccagctactcaagaggcagaggtgggaggattgcttgagtcctggaggtcaaggctgcaagtgagctatgaacataccactgcactccagtctgagtgacagagctagactccatctcaaaaaagaagaagaagaatatgtgtgaagtcccatatagtcccagtcccagcacactgtccctacttacttactagacacagtattatagtatctgtgacagtgatgggcatgtaaaattgtatgtttagtcaaatcatatttgactggagacatgtctaacttgtttaataagtcacatttataatgcctttgctactcatgaacatccagtcacttgatttcactgatacctgcagtcctaggcttgccagtgtcccaggcctctttgttcactatttcctgggctactgcttaggctctatgcctattatacatgtagatatgaccctctgttctctgtcatcaacagcagttgaatcagaggccttgttttggttatctcttgctgcctaactaccccaaaatttagtggtgtggaacaacaaccattatgttctctctcacaattttgtgggttgatgtgcttcagctgagtggttcttatggtccatgtgatattggctggggctgcagtcacttgggggcttgaatggtctggaatgttcaaggctgctcattcacatggctgatagttgatgctagtcatcagctgggagcccagctgggctgtcagctgaagtggccacctgtggtctctccatgcccatgtggctcaggcttctgacaacatggtggctgagttctgagaggggaaatcgcaagagtgagccttccaagagaagaaaagtagaaactctcagttctctttttttttttttgagacgaagtctttctgtcacccaggctagagtgcagtggcgtgatctcggctcactgccagctccgcctcccgggttcacaccattgtcctgcctcagcctcctgagtagatgggactacaggcgcctgccaccatgtctggctaattttttgtatttttagtagagacagggtttcaccgtgttagccaggatggtctcaatctcctgaccttgtgatccgcccgcctcggcctcccaaagtgctgggattacaggcgtaagccactgcgcctggcctaacattttagttttcttttttttttttttttttgagacggagtcttactctgtcgcccaggctggagtgcagtggcgagagctcggctcactgcaagctccgcctcccaggttcacgccattctcctggctcaacctccagagtagctgggactacaggcacccaccaccgtgcccggctaatttttttgtatttttaatagagatggggtttcaccgggttagccaggatggtctcgatctcctgacctcgtgatccgcccacctcagcctccctcagttctcttaaaaactagcctcagccagttgtgggggctcatgcctgtaatccccatactttggaaggccaaggtgggtggatcacttgagcccaggagtttgagaccatttgtgagtctctacatggcaacatggcaaaaccccgtctctacaaaaaaatacaaatacaaaaattagccaggcatggtggcgttcacttgtagtcctagctactcaggaggctgaggtgggaggatcacctgagcctgggaggcggaggttgcagtgagtcgtgattgcaccactgcactctagcctggatgactgagcgagactctgtctcagaaaaaaaaaaaaattaaaggctagcctcacttctgttgcattccctcccctcccctcccctattctctctctctcgctctctctctttcttgctttctttctctctttctttttgagccagggtctcactttgtccctgaggctgtagtgcattggcaccatcttggctcactgcggcctcaacttcccgggttcaaacaatcctcctatcttggccccccaagtagctgagactacagacatgcaccaccatgcctggctaattttttttttttttttttttttttttggagagacagggttttgccatgttgcccaggctggtctcaaaactcctgagctcaagcaatttgctcaccttggcctcccaaagtgctgggattacaggtgtgagccaccgcgcccagccttctgttatcacaggccagctcaaattcaaagagtgaaggaattgactcagctcttgatgagagattggcatgtgcatatagggaatggccttcttactatagggtcagtaccatattcctttcaaattgccttcatgaagtgtaagtctttttaaaaggatacttacaaactcaagattcataccctagaagtaattctggaaaaggtggtaagatatcattgacctaaacatgagaacctggaatgatttgtcttggacccagttgtatggcattggaaccatacttgtgtcagtacataaacatgaaagagctaatctcttttgaatggaaaatgtggcccaattctgtaagaaagggtttaaggccatacgtgattattgctagagcagtggttctcaaagtgattttgtccttcagggggtatttggcaatgtctggagacatttttggttgttgcaactgggtagggggcagtgctactggcatgtagtgcataaaggccagagatgaagctaagcatgatacaatgcacagtgcagccctctcccacaacaaagaattgcagcccaaacatgtcaatagtttcaaggctgcctgagctacagcaaagattcttcccacactgtcttggaagttcatacaaagtacattgctttttatactccaagacatcatttgtgccttttttcctataaaaaacttttctatctgtatatttccaaattcaaattgtgagatttctttaaaggctctttacaacttctatttattttttgtatttaaataatttatagggccgggcgtggtggctcacgcctgtactcccagcactttgggaggccaaggtgggtggatcacttgaggtaaggaggtcgagaccagcctggccaacatgatgaaaccctctactagaaatacaaaaattagctgggcacggtggcagacacctgtaatcccaactattcaggaggctgagaaaggagaattgcttgaacctggggcggaggttgcagtgagccaagattgtgccactgcaccccagcctgggcaacagaccgagactgtctcaaaaaaaaaaaaaaaaagaatttatgtacagaggttggatcaaggtgacttgtagggcacaccagttccatcccttttcttctacctcaaactctaagagatgacaagaaaaaaattacatctatgtataaatccatctttatctgtatctatacctgtgtgtgtgtgtgtgcgtatgtctatatctcctgaaaaggaagaagaggtgatgactatggatcagaaattttgagcatcattgaaaggctgtgcatcaggaaaggctaaattatgctgtggtaacaactcccaaattgaagttgtttaaaaaactatagactatttctcattcatgctcatttggactgtcagagggctagttgtttagggacctaacagccaccatctttttttttttttttttctttttgagacagagtttctctcttatcacccaggctggagtgcagtggtgcgatcttggctcactgcaacctccatctcccaggttcaagccattctcctgcctcagcctcccaagtagctgggattacaggcgtgtgccaccaggccagctaattttgtatttttagtagagacggggtttcaccatgttggtcagactagtctcaaactccttacctcaagcgatccacccacttccgcctcccaaagtgctgcgattataggcatgagccaccatgcctggcccagccaccatcttgaatgttgctattgccttacagaggcaaaaagagaactccgaagggcttctcattggcagttgaatgctctgccctggaagtgaacgagaatcaagtatcctactcacagttcattgctcaggactacttacgtggccccaggacgtgcagtcctgtcagtggcctggagaggggagaatggaaaatgtttgacatatggcttgattaactccttcaaaggccaggacagatgggctctactggaaggaagaagccacagctcaagtgtgcacagggcagggctcctctggaagatgggagtggctcctgaagatatagcagggaggagaggaccctgtacaaaagacagagtaatttattagagtactctcacaggaataacctgggagattgattcccccgccccccgtatcccatagatgggaaaattaggaggagtgctctattttaacatttggaaatgtcttaacatttgatctttaatgtgctatggaagttacataagtctccactataaagttccgtgttcaaaagcattgtgcctagtactgtgtgtgctacattggatgttctcagtgggtactcattgaattgaatgatggttctaaacttaccacaggaaaaatgcatacactgtttttaaaaattatcattgttattattataccattattctatcttacagagaagtttggatttggaaacaagttagagtcctgtgagggccttttaaggaatttctcctgcccaggaagctgccaggatccaaagaaaaagcatgtccagatcccaacttcccttgtattgctgcttatttttccttgcaatttccctgacccagccaccatgcttgctctttgcaccttctcagctttgtgaaaggatgtccttggtcctccaggccctgctttcctgttggtggcctctatctggattgggtctcttgagacactgttaggggtcagacttcctggggccagatctgctacccactagctctgtgactttgggcaagcttcttaatccttctgggccacactttcctcatttggaaactttgaataatactagtacgtacatcataaggtactagggttagtatgagatgcagtgatacttacaaagtggttagagcagtacctggtgctttgtaagtgtctgatccatgttagccatcgatgtcatcaccacctctcctccaagctatatccatgtcttttcttttcttctttccttcctttcttcctttctatttttctttttcttttcatttttttgacagggtctcactctgttgctcaggctggagtgcagtggcgtgatcatggctcactgcagcctagacctcctgggctcaggtgatcttcccacctcagcctcctgggtagctgggactacacatgtgcgccacgttgcccagtgtctcaagcaattcatccaccttggtctcctaaagtgctgagattactggcgtgagccactgtgcccggcctcttgagctttcttttaatgattataccaagaattcttcatcactcactgcagggccaggaccaagacaaagtgttaaatgggttccattttgctctggcttccatctggcttgattaccagtcccggccttcccttctcgctgttctgggcttattcttgcctttaatatacagtcaataagcaactcaagaggggccgtatttcaatccagcattcctgaagaccagggggccttgtgaacacatttgttcttcaccttatttgattgcagatcttttttttttctttttcattttctttgagacaaagttttgctctgttacccaggttagagtatagtggcgtgatcataactcactgcagctttgaactcctgggctctagcagacctacctcagcctcccaggtagctgggacttgagatgagtaccaccatgcctggctaattttttaaaaaaattcttttgtagagacaaggtctcactatgttgcccaggctggtcttgaactcctggcctcaagtgatccttccgtctcagcctcccaaagcattgggattataggcatgagccaccaagcccagtctgtagatccttttgaaaatctgatagaaagaatgaaagctctcccaaatgtgggagcctgtggcttcaggggagtctccagaattctaggcattagatttaacatttaaaaaaaaacaagggccagtcgcggtggctcacacctgtaatcccagcacttcgggaggccgaagcaggcagatcacaaggtcaagagatcgagaccatcctggtcaacatggtgaaagcccatctctactaaaaataaaaaaaaaattagctgggcgtggtggcacacacctgtagtcccagctactcagaaggctaaggcaggagaatcgcttgaagctgggaggtggaggttgcagtgaaccgagatcgcgccactgcactccagcctgatgacagagtgagactctgtctcaaaaaaataaaaaagattaaaaaaaaaaaacaaaacaagaatgacgaaagagcaggtggtgtggacttgctatttggaggttgagggcctgtcttctgccccttcgatcattaaggaagttatccagtcttatggcgagatcaatatcattactgtatggccgggcgcagtggctcacacctgtaatgttagcactttgagatgccgaggcgggcagatcacttgaggccaggagtttgagaccagcctggccaacataacaaaacctcatctctactaaaaatacaaaaaaaattagctgggcgtggtggcacatgcctgtaatcctagctacttaggaggctgaggtatgagaatcatttgaacccaggaggcagaggttgcaatgagccgtacttactatatatatatagtaacttactataggtctttgtatatatatatagttactgtaagacatttgtatatcgcaaaaaaaaactatatatatatatacagttactgtaagacattagtatagtgtaaaaaaaaactagaaaaaaaaaccaaaaaacaaacaagaaaatctagctcctgtgtgttttttacatgaccttgtggcacctgcaggctaattttgtttgttcaggttttgccacatcctgtgatcgttcattatctttgacttgatatgtgaccgtacaagaacatttcagttatggcctaacataatatgtgctctaaaaattccattgcagaaatcatacttgatgaaggtggccgtcattcatttttgtcacctaatcatgaatgccagtgccactttccatttcaggactggcatggaaagttatgcctgtgcatcaaacaaaagtttgcatgaagaaggagcctcttgttcaattttgcatgagatgtttcctattgactttgaaaacttgaagtgtttgaaggcaagggggaaagcaaatcaacccaagagattccacatattcaaagactccagcactttgtttacctaacacagaactgtgtgctggtggcgaaataaagcctttgccctgaacaggaaatcttggtggagtccaggcagcaggaggcctggcagcattccacagtgatcagctgaaggaaaaacaagagtttacaatactaaccccaaatgccctttttgtctcccaggagaataatactatcttggcctaggagggttgtgccttcatgctcaactcttggtctaacagtcatgaagctgcagtaacattctgttttcccctccttaatcttctttatcaaagtcttaatcctttgctgctgttgtttttgagatggagtttcgctcttgttgcccaggctggagtgcagtggcgcgatctcggcttgccacgaactctgccctctgggttcaagtgattctcctgcctcagcctcccaagtagctgggattacaggcatgtgccaccatgcctggctaattttgtatttttagtagagacagagtttctccgtgttggtcaggctggtcttgaactccagacctcaggtgatccgcccacctcagcctcccgaagtgctgagattacaggcgtgagacccctaatcctttttgtttgtttatattatgaaattaggccattctataagtggtacacttttcaatttcttaaaaaagggaaaggtaaattatttggggcagacaacaaaataggaatgtaaatgcttgaactgttgattaaatttgtgtgttgtgttgttttgttttgctttttgagccagagttttgctgtgtttcccaggctggagtgcagtggcgcaatctcggctcactgcaacctctgcctcctgggttcaaatgattctcatgcctcagtctcccgagtagctgtgattacaggtgtgcaccaccacatccagctaatttttgtatttttggtagagacagggtttcaccattttggccaggctggtctcaaactcccaacctcaggtgatccgccctccttggcctcccaaagtgctgggatcatagacatgagccactgcgcctggcctaaatttgtgtttaatatggcaggagtgacggctgggtctggtgacctccatttctctattgaatggggagaaagcacagcctttggggtttgaagggcattatcgctttaaacatgttttttgatttaaatttttaaatattttttagagatgcggccttgctctgttgcccaggctagtttagaactcctgggttcaagtgattctcctgcgtcagcctcccaaaatgttgggataataggtgtgagctaccacatctggctgctttataattttttacttggcgtttctttatctgttttatggggacaataatatctacctgatgggtggacacatagtagctgacataagtgagaatctccacccacaaactttaaaactgttgcttacgcatcatgctattggtccacagtatatggatttgtggatcgtgtcttcttccttccatttgaaaactagaacatttgcttatctcccgtccctctatcacttaccccatcctttgtgatggttttgaagcactgatcattttcctgtattactgtggggaagtggattatctgcaatacatgccttgtgttcatttcctctcctaccagtcaggcatgcagttttgataaactacctcccaagttctgaaggaattaggcttaacctaaaataaacaaaacaatagaattttgatagaagtggaacagaggcctgcagtgttgtcccaggagctgttgagggcagtggcgcctgcttctggccatggacagagagattcagcatcaccatgtcattgcagaatgaagggagagttggctttgttaaccaccttggctgcccgtgatgcactgatcagttaagataccaacatttcttatttacatcctgtgttgttgtttctccgcacccaagggatgtgaacagagtggtggcagtgatggttgccagccctctgtcaccaccctctccactagaatgccatgtattatgtatttccactgaaggacttgattttagcaccgaagagtgagtgagtggtcgtgtaacctgtacctgcaatcttggccttgaattctcattttattcctcaatgcactggcttagaaatcagctggctggtagctgtgagccaggcccatgcccactgctttcagctggagccctgcagggctttgccctcctgggtggcctttgcctggtacgcctctcttgtgctgggctgagggcagctcttggttatgtatgattagctcaaattgtgattcaaaattggcacaattatatcatcctaattaaaaaaataaacctgaaaatgtagtataaattcctaacttctgaaaattcctcgtaatacccatcccagttttcaaagcagtttcataagttactatttattttttccttcttttcttttcattccttccttcttccttccttcctttccttccttctttccttcttttctttctctctctttcttcctctttctcttttttccttttttttgaattggggatcttgctctcttttgataatgcgatcatatctcactgcagccttgaactcctgggctcaagccatcctcctgcctcagtctcctgtgtagctgggactacaggtgtgttccaccatgcttggctaagtttttacatttttttgtagagttgaggtctcgtcatgttgcccaggctggttgcaaacttccaggctaaagtgatctcccacctcagcctcctgagtcactgggacatatttctgtggaatctcccagtttggcaaaacattaaccctagaattactttaacattgttggaaaagaggtaccccttcgacttccttttggagaatatagcctcagaatttatgctccctagaaaccagaagtgatttcaagcaatgagctagaaagaggaaatctctcttctttttgtagacttactgctactagtctttggaggaaggtccccaggtgggtatatgtatcattgttgtgacacttgtgataaggttagcctatttttaatgataaagcactaatcatccttttcttttaaaaaatcgttataaaaataaacagtacaaaagagtataaaatgaaatgtaagggcgggcgcggtggctcatgcctgtaatcccagccctttgggaggccagggtgggcagatcgcgaggccaggagttcgagaccggcttggccaacattgtgagaccctgtctttactaaaaatataaaaattagctgggcatggtggcacacacctgtaattccagccactcgagaggctgaggcaggagaatcccttgaacctgggacacagaggttgcagtgagtcaagatcacgccactgcactccagcaagactccatctcaaaaaaaaaagaaacgtaaaagtcctaggtcttcatgcttctccccagaagtaattattgtagataacttttgtgtatccttccatatacacacctacagatctatatacataaatatagatagacatacatacatatgtacatgtgtatattgtacacacacaaacagcacgtatatctttttttctaaataccaatggaattttaccaaaatattatcttgcatcttgcccttttttcacttattgctataataaggcagcttgccatgttggtacatgtagctctctcatatttttactgtctgcatagtatcccattgtatgattggatcatagtttatttaacgagatgtctattgatggatgtttagattgacccatgtttttactcataaacaatcttgcagggaatctcctcttacacagcttatctaatgcatttggtgaatgaatattctcattcatggagtcaaacttggtaactatattgttgtattttgaatattagtgatttagtggatttaagcagaaaatattttaatgaaatttaatggctaagtaacaaaagatcgcctttatttgcacaagaaacattcttacagatggtgaaagtgttacagaagccagtttagttgggttaatattatcggttaggagttaattcacagtaaagtgtttgttttagaacatcaaattaatatgccatgaaggaatttaagggggtggcattttttatgagttgccatagtggcagatacagagttgtggcacatacctcatgagaatgtacttccagaggtagaactaaaaaagaataatttctcataagaggaggtgagaaatgttgggggtggatttttctttctaaaaccatgctcataagtgatgaaaaggacagcttttaaaaatcaccaaagaactaaatgtatgactaaatagtggaaaggatcttaacgtacatgtttgcacaaaaataagaaactcattttaattccatgaaacaaatactaactatggtttagagtgaatcttgacagcattcatagatatggctctccttaaatagactcttagaattagatgtatttgctctgagctcagagttaaatcctcatttccccttatgtcacaccctactgccaagtgtctgattagcagcatcctgaaaggaaaagccggctgcctcccctgaagtgggtccccagttctgtagtccagcttgctccagaggttattgtcactctgccaccaaaaacaaccaatacagtcaaagctcagcagctccagctctagctggatgaattatcttctaaccactcttaccccacattgtacaactgcatccatccttcctcagttgtacagacaacttaaatatttcctctacaccattggttctcaaccagtggccgttgccccgtgctgccaccaccaggggacatttggtggagtttggagacatttttggttgttaaagccataggatgctactgacatatagtcgggagaggccagggatgcttctaaatatcctgcaatgcacagaatagttcccccacccaacaaagaattatctagcccgatagcgctgagggtatgaaaccctgctgtacacagtgatgtcacatactgaggtctcattgttatttcagttttctggcatatctagtttatcacatactacacctttgtcaaaaattggattgttcggccaggcgcagtggctcacacctgtaatcccagcactttgggaggccgaggcaggcagatcatgaagtcaggagttctagaccagcctggccaacatggtgaaaccccatctctactaaaaatacaaaaattagccaggcgtgatgctgcgcgcctgtaatcgcagctacttgggaggctgagggaggagaactgcttgaacccgggtggtggaggttgcagtgagccaagatcgtgccactgcactccagcctgggtgacaaagcaagactctgtctcggaaaaaaaaaaaaattgtattgttcaataatggaccaccttagacatcgagtaactaaggggactgatactgtggtagagtgatcttagcattaggctaggtggcaattaggagataggtgttctaatctcattattgcctctaattagctatgggaccttccgagccatttaattatcttttgtgaaatgagagcatttgcctaagttgcctagagtctttctaagtcttaaaatattccattactctgccattgcacatatattttttaagtgggataaggatgaacagtaggtacatacaggtgttccattgattctttctatttcccctaccaatagacgtatttctgtaggcctggcatgatggctcacgcctataatcccagcaccttgggaggctgaggtaagcagatcacttgagatcaagagttttgagaccagactggccaacgtggtgaaaccatgtctccacaaaaaatacaaaggttagccaggcatggtggtgcatgcctgtaactacatcccagctacttgggtggctgaggcaggagaatcgcttgaacccaggaggtggaggttacagtgagcagatgtcatgccactgcactccagagtgagactctgtctcaaaaaaaaaaaaaaaagataattctgttatataatcttttgttaactctgcagatgtcctggctttaagatcgtcctgtatgatcatccaatgctgagaagtgctgatgacctaatactaatatatcacataagacacttcattttccagcaacagtaatatatagcattagttcattcatacatctacttttgatcagacatttactgaggggtgatcgatgccaagtatttgatccatatagtaatcctgcagccaggcaggaaaaggcttattctctccaaattacgtaccagaagccacagctcagagagatgtcccaggtcatatgactccataagtgacagttccaagacagatgtttccaggactcccttaattcttggagagagcaccttccttctgtgatctagcgaagtcataggacaggagagccacagccagcaactgagagtggaaactttacttatcagattagaaaacatatgcccccagaaaggtgaaatctcacaaaatagacacaaacctcaggagttttaattaaaaaggacagctttttaattcccttctcttccagttctctaaataatgtatttctgacattaagtgtattaggaccagactggtgtcttctggcagtagaatggtagacaaaaaaaaatgtgttttcaagctggagacctgaggctgggcatggtggctcacgcctgtaaaaccagtgctttgggagaccaaggagggaggattgcttgagcccaggagttcaagaccagcctggggaacatagtgagactgtgtctctacaaaaaaatttaaaaattagccaggtgtggtggtgcacacctttggtcccaactatttgggagactgaggtgggaggagcacttgagcccaggaggtcgaggctgcagtgagccatgaccatgccactgcactccagcctgggcaacaatgtgaaactgtgtctctgaaaaaaaaaaaaatgaatttgaacacctgcactaaaccccatctccaccactgccggctgtataacccaaggcgagttactttctcttaagccttaattttctcatctgtaaaatggggattactaatacttagttcataggattgctatgaagggtaagtgggataatatgtatctgtaagtcctagtctaggaacttctttttctttttcttttttttttctttttttttctttttttttttgaggacccgaccttttattttgccaagcaaaaatcttaaaaacaacctataccaatatctccacaaatctattagcatttcataaaagaaaggatattttaacattcaaaatgaaagaaggacctaatcccaaaataaagatcagttttctgtagtccctagtgtttttttctcacgtatccatggactagtaagggtttcatcatggcctagcatgagtccataggccactgcttggaaaacttctatgtatccagtatacaatgcactgattactgtgctcagtgcttaacaggcaactggaagatggtaagaactattattaataacagacacttagaggttttgatatatgtaactttagagtccttctttccatttctaaaaattccgacaatttttgaacaagtgaacgagtggcctcttgtaagacaacagagccagaagtcctcaggagctcagtacaattgtgtctttgctttataaaataaatcatcatgaatgagaagtagctttgccatgtgtattactttcaccaggtattatgcctcactaaatgcagagttcttttctgtttctccgtattatgttagattgtttacctgaaccctgatggctagcttctttacagggttgtgaatgttgtcccttcagtcattagcgaaatgcttattgtgtatctactatgctgcagaccctgttcctagggtcggggatacacagtgaacaaaatagacaaaggctctccctctctttaaggggctttttatttttatttttatttttttattgagacggggtctcactctgtcacccaggctggagtgcagtgatataatcgtggcttaccacagcctcaacctcccaggctcaggtgacactcctacctcagcctcctaagtacctgggaccacaggtgtgtgccaccatgcctggctatttttttctatttttagtagaggtggggtttcaccatgttgccccggctgctctagaacttctgggctcaagtgatccactcgcctcgacctcccaaagtgctgggattacaggcgtgagtcaccatgcctggtctttaaagggctttttaaattctagttctttggctgggtgctgtggctcacgtctgtaatcccagcattttgggaggccgaggcaggcggatcacctgagctaaggagttcaaaaccagcctgaccaacgtggtgaaaccctgtctctactaaaaatacaaaaaaaatagcgaggcgtggtggcacgtgcctgtagtcccagctacttgggaggctgaggcaggagaattgtttgaacccaggaggtggaggtgcagtgagccgagattgtgccactgcactccagcttgggtgacagagcaagactatgtctctaaataaataaataattctagttcttaggatcatggttggaaggggcagaaggggtatatagacactaaaagaaatctgtaacagctgctgctgtgaagaaaggaaagcagtgttagagatgaagggtgtgattaaaatatgatggcctggataggtttctctgataaggcaatgtgtgtgtagagtctggaagaattttggtattaaaggagtaaattaatacatttttgttttgcttgtaaacttaattctctgatgaagtgcctcttctattacctttctgtggaagaggagaaaatgcaaatattggaaaagagcaagagaaatagtaacatacttatggcactatttcctccatttatagagcaaaaatgaaacaaacaaaaaactgaattaagtggcttttaaactaagacacaagcctgcttttctcaaacacctttttccttttctttctttttttttttttttttttttttttgagacagggtctcactctgtctcccacgctggagtgcagtggcacagtctcagctcactgcaaacgccgcctccctggttcaagcgattctcctacctcagcctccagagtggctgggactacaggcgtgtgccaccatgcccggctaatttttgtatttttttttgtagagatggggtttctccatgttgccaaggctggtcttgaactcctgagctcaagcgatccacccaccttggcctcccaaagtgctgggattataggcatgagccaccgcgcccgacccctcaaaacacctattattactgcttttcctttatggctgcctgggtatcaatccaagaagcatctttgaaagtgttaaatatttacttacactggcaaaagtaagcttcatctgtgaaattgtcttataggacccaagaatcttaaagaaaaatattgaccactcagtggtggcttatttaggaatatctgtatattttttgttaaatgttctagaatttaaaattcttctgagcacagtccctatagaattgaattaattcttttacataattccaaagttgaaaaagatgaatgacttgtctactttcagctagattttaacttttgaggtaaaattgctaacatcctttcaagtaagttctttatttccaaaattactttttctttttcttcttctttttttttttttttttttttttgagatagggtctcactctgtcacccaggctgcagtgcagtggtgcaatttcctcagctcactgcaacctctgcctcccaggctcaagtgatcctctcatctcagcctcctgagtagctggtaccacaggcgcatgccaccacacccactaattttttgtagagacgggtttcatcatgttgcccaggctggtctcgaattcctgggctcaagagatctgcccaccttggcctcccaaattgctgggattacagtcatgaaccactgcgcccggccccaaaattactttttctaatgacacacaacaccagaggattggaaggaaacatccagaatttgctccagtgttctttttcatcacttatgttccttgggggtttctgtggttccagaagccattcatgcctgcgagacagcggccctgggggagaattgagcttttttctctcctgagcagatacgcttgttggattgcattaaatgagccccttgaaccactgtgctcagccttgtctgcacatcggcatcaactgcaagttttaatgatcttgatgcccgggactcatctccagaagctctgatttaattggtatatagggcagcctgggaatcaggattttgtaaaagctcaagtgcttctaatatgcagccacgctgaaaaaccactgccttagagcagtgcttctcaaaatgtaatgtgactattaaccacccagggatcctattaaaatacagattctaattcagtaaagtgtgaggtggaggccaatgatgtgtaaataagaccatagagcaggagtcagcagcctctggcctgtggaccaattctgaccctatgcctgtttttgtacagcctgcaagctaataatgactttcacattttaaaatgattatttttaaaaagaagaagatgtaactgggcattgaaggtccacaaagcctaaaatatttactatctggccctatacaggaaaagtttgctaacccatgatctatcttcataaggttccccataaccactgaaagtctcttctcagtattatcccactttattggatcctatagcctcttgtcttaggaattcccatacttaggaatttgtttttatataaaagaaatgaggtctgggtatagtggctcatgcctgtaatcccagcactttgggaggccatgatgggctgattgcttgaggccgggagtttgagagcagtctggccaacatggcaaaatcctgtctctacagaaaatacaaaaattatccaggtgtggtggtgtgtgcctgtaattccagctactccagaggttgaggcatgagaatcacttgaacccaggagacagaggttgcagtgagctgagatcacaccactgcactccagtctgggtgacagagtgagactctgcctcaaaaaaacgaaaaaaaaaaaaaaaaaagaaagaaaaagaaatggcataaactggtagaatacacagcccatgaattgttggtcataaaattaactgcaaatgtaaatattattttaaaatttcaactctatattttttaaaaattattttgtgattttattgtaaatgtagttccaaaaagacacattttccttgaatgacattttttttattttaagtaaagattgccaggacagagagaaccaagagtcactgaagattccccttcagaaatagtaaagttctactgcgtatattcggggtttgccaacaatgatttgaaaaataaaaggttgctttctactgaaatgctgaatgaataaatttgggtgcatgagagattcactgtctgtgggtaaacaaggggcagtgtgagtcttaaaaaggaagattgttgagggcaatatctacatttcacagatgaggaaactgagctttggaaaatgcaagtgaaaatctgaggaccatagcgaaatagtggcaggacgagaactggaagttgctctcctgatttgtttccagttcatattttttctgtgattctgcattctactcaagaactaatattatgattaaaatgcctgacagtataaaaggaccagtttaaaaactatcacagatattcctatttgtcatacattatgttttcctttaagaccctgaggataggctgggcgcagtagctcacacctgtaatctcagcactttgggaggccgaggcgggtggttcacttgagctcaggagttcaagaccagcctgggctacatggcaaccctgtctctacaaaaaataccaataaatagctgggcgtggtggtgcctgcctgtagccccagttatcttgggggctgaggcaagaggatcacttgagctcaggtgatggaggctacagtgagccgagattgtgccactgcactccagcctgggtgacaaagtgagaccctatctcaataaataaataaaatgaaaataaaaccttgaggatatttataatattagctgctttcacgtccttgtttgttaattccatcatctttatcatttcaagatctgtttctgttgactgatttttctcctgattataggtaatattttcctgcttcttcccatgtctagtaattatgagatgctggacttagtgatattacattgtagagtgtctgtattttgctgcctttttataaaaagtatcaaagtttgttatggcaggcagttaaattacttgcttatcaacttgatcctttcaagacttgtttttaagctcacgggatattttctctctctctctctctctctctctctctctctctctctgtgtgtgtgtgtgtgtgtgtgtgtgtgtgtgtgtgtgtgttgggattacaggcgtgagccactgcatccagcctaaactcactagggagattttttgaatagcctgtactctgtagctagtttagcttgctaccaaggtttagcctttctgggtctgtactgaatatcccaggtattcaacagtcatctcactctggctgtcagaacatgcatgtctcccagccctgtgtgagttctggaagttgttcagctcacagctcccctggctgtgcctggcattatgacttagtgttcactgtgaaatactcaaaagaatccctatgctgatttctggagctctttatctgtttagctccctcatctccaggactcagcttcagaaattccaggcacctgaaactgatctctgtctctttgctgaggaaactgctgtgaggcagtgagattgctgtgctctgtttggattccccttccctgcgctgtggtctaggaagtgcctccagcagaacactgggggcaattgtaggcacatcttgcgtcccttctctcagtgatcaaagtcctatactaactgtgaccaggatctgaaagcagttgttttttgtccagttttcttttctttttctcctttttttctttttctttcttttttttatttttttattttttttgagacagccttgctctgttggagtgcagtagcactatctcggctcactgcaacctctgcctcccaggttcaagcgattctcctgcctcagcctcccaagtagctgggattacagacacctgccaccacgcctggctaagttttgtatttttagtagagatggggtttcaccatgttggccaggctgctctagaacacctgaccttaagtgatccacccgccacagcctcccaaaatactgggattacaggcgtgagccactgcaccaggccattttgtccagttttatagccatttatagcagaagggcaaatttggtatagttaactctgccattgccagaggctgttcacttagatttgtcttgtaacatttttctgtagtaagtaaaggcagggatcctgtacccattttataggttaaataatgcagagttgccaagaaataagagggttggaatcacatactgggttggttggtaggtaggtcatatgatccaggaactcttggtccttgcaaggagataggaggaaatgctcaaatttgtctccccaaatgggggcctgggttgaggtttataagcatatggtaatgaggcgtgaatgaggtgactggattgatcttggaatgaggtgattgattggatcttacaataaggcgatgatgttgggggtcatgatctaactggaatccaccatggggtgactccagggctcaatctgattggatcctggatcctgccatgcagtgtccacttctgttttgttttgttttgttgagatggagtcttgctccattgtccaggctggagtgcagtggcatgatctcagctcactgcaacctctgcctcctgggttcaagcaattcttgggcctcagcctcccaagtagctgggactacaggtgtgcgccatcacacccagctgatttttgtgtttttagtagaaacaggtttctccatgttggccaggctggtcttgaacccctgacctcaagtgatctgcccgcctcagcctcccaaagtgctgggattacaagtgtgagccaccgtgccccgccagtgtctacttcttaattcagtcccactcctcggtctgagcacttaggttccccctagtggaactaagcatggttgcatgcttggttcatctgggcatgctcaggttatgagacctgagggtccgtgacaactgaaaaacaactcacaactttgttacgtaaaagttgaaccagattgatctggtgtgaccacactcttacccttatctgttatttctcattccaaactttgcttattaactgtaatgtttgcctttgtaattgcttcactttcatcacatataagaagtactcaatgaatgcttactgatttcatgcactgtaggaacaacaccgactattgtcatgttggctgttgtcatattaaaacatcatgtaggccagtcatggtggttcacatctgtaatcccagcactttgggaggctgagacaggaggatcctttgaggtcaggagttcgagaccagcctgggcaacacagcaagaccctgtttctacaaaaaataaaaaaattagccaggcatggtggagtacacctttagtcctagctacttgggaggttgaggcaggaggatggcttgagcccaggaagccagggctgcagtgagccatgatggtgcaactgcactccagcctgaatgacagcgtgagacccagtctcttaaaaacaacaacaataaaatcatcatgtaacttgctaagacagccacacctttgtgttgtgcctaaaaaattactgagttctggtggatacataatgaggacttgacagtgttttttttttgttttttgttttgtttttagaaggagtcttgctctgtcgcccagacaggctggagtgcagtgctgtgatctcagctcactgcaacctccatctcctgggttcaagtgattatcccgcctcagcctccccagtagctgggattacaggcgtgtgccaccatgcctggctgatttttctatttttagtagagacaaggtttcaccatgttggttgtccaggcttgtctcctgacctcaggtgatccgcccacctcggcctcccaaagtgctgggattataggcgtgagccaccatgcccagccagtcttattaaatgcttcaaatatatgtcacattcagcttcatgtccctgatggttccctgcaccatgctacgccaataaacactcaacggatactcaacggatacaaaagagtatttggtagatcttcagagacggaaagcaaattcagtgcctttattcagcaaaaattcaatgagcagctgctatgtgctggacactgtgctagcccctggggatgaagtgtgaattaaaggcagtgtctgccctcttgaagttcaccacccagtgatagaacacccaagaaaccagcctccaagatgttcagattaaaagaaattcttccacagtgacattttcaccaggcaaactcagagttgtttgacatgagaaggtttaaaaaaggatagttgtgaaagaccaggcaaagttcacaaagtgaagaagggaaaatattatttcagactgatattaaatgatggcctagcctgctgccatactgtctcacagggaaaagttttatttatgtctcctttgatcttttctcctttttgtctctaggtttgatgtacaagctttagcttgggcctttgatttacagtgttctggagaaagagaccagggatgacaaagccaaccaggctgttacctaaaaacctgatatattgtcctagatctaggctgtcttagagctacacaaagaatttccagcagactgctcaggaagagcctgctgggaaggcagttcccctaaagtcccataaaataaagagcttcccagtccttctttgatatccacggtttgcttaagtattggatgttaaggcagcaacttctagtcctgtggaaaatcttttaatatctgtgcttaatcaactgagaaaataaaaatttatagatccatcaatgacaaatatattaaacatggggctttaaaaattgcctggaagtctgtgaccaacatttttttagcctgtaaaatatagtttgtttaaacttattaaggctgggcgtggtggtggctcacgcctataatcccagcactttgggaggctgaggtgggcggatcacctgaggtcaggagttcgagaccagactggccaacatggtgaaaccccgtttctactaaaaatacaaaaatcagccgggcgtggtggtgtgcacctataatcccagctgctcaggaggttgaggcacgagaatcgcttgaaccaggaggcggaggttgcagtgagctgagatcacaccactgcactccagcctgggtgacagagcatgactctatctcaaaacaaaacaaaacaaaacaaaaaaacttgattatagtatactggatattgagggatagggaatttagttatcagctgggagtaataacaaatttctggaaaactcaaacatcgatcatatcagagtttctgaggatcagaaatccaggaggggcttaatagggtagttctggctcagggtctgtcatgaggtggccgccaagtgaaaccttccctggagctggaagagctgcttcagagaagactgccaccggatgcttggctggagttttcagtttttctccacatgggcctctcccagggctgctgagtgtccttgaactgtggcagtcagcttccccacagtgagtcgtgagagagggagacagccaaacagaagccctggagtctttcatgatctcatctcagacatgatgggccatctcctctgctgcactcgacagtcatacagaccaaccctgggaccacatgcaaggggaccacctgagggtgtgagtgctaggaggtgaggagccatcctggatgctggctacctcataggtgactggccaggcaaagtttattaactaaaagttctttgtgttgactcaggtgaactaacatttactgcttcagttgttcatttaatttaattttcttgagagatttaaagtaagtgctcaaagccaggcatggtggctcatgcctgtaatcccagcactttgggagcccaaggcgggcagatcacctgaggtcaggagtttgacaccagcccagccaacacgatgaaaccccatctctactaaaaatacagaaaattagccgggcgtggtgacgggtgcctgtagtgccagctacttgggaggctgaggcaggagaatcacttgaacctgggaggcagaggctgcagtgaaccaagatcgcaccactgcactccagcctgggctacagagtgagactctatctcaaaaaaattaattaattaaaaataaataaatgaataaagtgagtgctcagagctgtgttgctttgttgtgtgcatgtgtgtgagtgtgtgtgcttgtgtccctaagtcccagcagtgagacaaattgtgtggttccttatcgtacctgagaagcagggagcagccaccaagaagactgttacagtgggtgagttgtttatgccctgcttaaggccagcccctccacttaatcttcatctcctctctcctagtcatggacttcacacccaccgttaacccctcactcctgcattatcaatctttctctcttgactggctcattcttggctacatacaaagatgatgtaatatttcccatctaaaaaaaaaaatccatgaccccaggttcctctttaggtcctgccctgtttctctgttcctttttatagcagaaggctatgaaagatgtgtcttatttgtctatactcactctctccacctcttaccttcccgatttctctccaacccactccagtcacacttttgccttccctcccccaccccgcccccacccccatatatactccaccactgctattgttatggaactgtggtgtcttttgtccttccaaatccagtggtcggttcccagtcctttgtatttgaccaagcagcagcgttttacactgttgatcccccccttcccggatacctgttcttcccttggctcctgggacccctccctcagcttctcctcctgccctcactggctgctgtttctcatcctcctctgctggctcttcaaggcacttcttactgacctcaggcctcaggcctcttccctccacccctctgccttcagtcccttttgtatttttttgtagagacaggattttggcatgttggccagattggtctcaaactcctgacctcaagtgatccacctgactcggcttcccaaaggcatgagtcatagtgcctggtctagcatagacttgttttttgttgttttttgtttttttttttttgagatggagttttgctgttgtcaccaggccggagtgtaatgacgcgatctcagctcactataacctctgcctcctgggttcaagcaattttcctgcctcagccttcctagtagctgggattacaggcgcccgccaccacacccagttaatttttgtatttttagtagagacagggtttcaccatgttggccaggctggtctcgaactcctgtcctcaagtgatctgcccacctcagcctcccacactgttgggattacaggcatgagtcaccgcgcccagccaaaaatctcataatgttctaagaaagtttacacagttgtgttgggctgcattcaaagccatcctgggttgcatgggcaagcttcctccactgcctgcatctgtccccataggccacctctagaatgtgttccaaatagagtaatgtctcaccacctcctccactctacccaaaccccagccaccatcttccacaactcctgcagtagcctcgtacctgggctccagtcccatgcttgccctccttggtctcctttccagcagcagcaccagaatgtcacttccacctgcttaaaacctttcagtgcgcttaggacacaatccaagctgctccatcagctctctgggccccacaggatctggcttctccctgcctggctgtgactgcttctcccacctcttcccagccgcactggccttctttctggtcttcacacataagctcactcccacctccgggattttgcacttgctggtcccttagtctggaatgttcttccactacagcaagacctgttccctcactttcttcagatctctgctcagatgtgacttccaagaagccttcttgccttccccatccaacctgggcctccattcacctcgctctctatccccttcctctattttatctttcattatggcatttatcactgcctgtggttaaattccttatttatttgtttattttctgtttcaccactggaatataagctccacagagcaagtagcttgtctctcttgttcactcctgtatctccagcacctagaataagcctggcatacagtagctgctcaggaaatttgtgcaaaatgatgaataattaattattatttctcttctatgatcattgaagagctatgtttttgttgttgtttgttttttttttttttttgggacaaacctggctcccaacctcaacttcaggagatgaaggttgcatttttaagggaaaaaaatgtacccaaggaacaatttgatgacaaaatctccaattttctgtaacatggattgaagtttgtgtcttcccagttttattcgaagatcctaaaattcatactgctttttccaaatcctaacatttagattgtttttcaaatctaaagttgtggatgaattcttgtgacttctgtacgtactttgactgctacggtcactcgaagcttccttttcaaaaccacaggatggcttagctaaaccatgtcctttccaaactactttactgagtccctcctgttataccccaaagagaagatgtactcctttattagcagttggaacctgaaagaataaataattcaaaatagattcagcctttgttggtttctatgactatgaaggtatggaacatcattcattaacaagtgtcgtcggctgactgccttctcttgcacataaaaaatgagcatgcatataatcgcagcaacctgcctttgctgcagagtgaacagcttcagaaatggaccattctgtctcatcctgtctttacatatgtgggacccagcatgaggctattcagaaacaacagaatcaggtcgaggccagtcaatacagtcggtagctgttattgaatgcccactgggtggctgcaggctcctggctgaccacgtttctaagagctggttaatggagtcctcgttacagtcttggttaagctagcacatttaacagcccgcagtgcaaatgaaaaatacataggtctgactagggagcattttccctttctgtctttttccgtaaagagaggaaagtgattgctctggaagtttctgacattaatagccatgttggcatgtggctgtaagacaacctgagttaagatggtgatatgccacttaaaataacaaggccggcacagtggctcatgcctgtaatcccagtgctttgggaggccaaggtgggaggctgggcttaagcccaggagatcaaggctgtagtgagctatgattgtgccattgcgctcctgcctgggtgacagagcagaaccctgtctctaaaagaaaaaagtaatagggtgtgctgtgctattgttacatttataaaccactccttattttccagagcatggttgtttttatgatcttatctgctgcaagagaccttaaatgatattgatcaatattttcctgacagtgtaagttttcattctcagaactgagtattatgcaactgacgacatggggagtggggcttgaattttctggaccactcagggttgggatgtgagtgccactggagagccccttggcccacaggaaggaagggctgcacatgggtatagggccacacggaggtactgtatgagtggtgggaggccagctggcatcaagcactgttctctaccatcagtgggtgtgaatacgactgcaggttatttttctgtgctgttcaggttttgcttttatttctcttttgttggtctgatcaagctgtttattgtttgcagatggtaacaaaatataattaagttgtttgttgttgaagctcctgtaggaaaaaattatctagttttatcaactctgtaaccacagccctccttttcccatattgaaatagctatttatatgatttttttataatgtgaagttcttaggaacatagttattatagcagagctaattgtaatatgtttgaatgcaaggatccaaatcattgaggattactgccattctgatacctgtacaaaattatgcactgtcaaaaaaaaaaaaaagaaaaagattatgcattgtcattgaggcagtttgtataggatagcaagatcttctccaagtggctttcctttgacagtcctcacagatggctttcctgtgagttgccatcacagtcccttgcctcccccaacatctccagctctgaagtcctcctccttgacctcaatcggagtagtcagttcagtgcagtagttgagaatatgactctggtaccggactctcctgggtttgaatctgaacttcaccacttactagtttgggatgttgaccaagtcacttggcctctctgtgcctcagtttcctcatctgttaaatacgatgcctcatacagaatctgcatgggttaaatgaattctgtgaaagcctggggaagagggcctggcacgcataggtttcacgtaagtgctgtggtctgtggctagtctgtcatcgcccctccctcatatcccccccttcaccacatcaccacctaccatcccccagtcccctctttctcccagaccctccctctctgcatttgcccctaatgccgtcagtagcccccactcccaccccatttccttgctgcttgactgtatcagctcaagtcctggtggagaagagatgaaacagtccaaccaggtaaagtgaggagagcttaatgaagagcttatgtacaaaggcatgagtgggcgtggcacccacagggaaagcacagagcctggggcccgccaccatgagagcgtgtgctcgcagcagctgtgtggaggggctgtcttgatgcgagctgtgggcctgctggagggatgccgccagcccaggaagggatccaaggatgtaaatagtccaaccttgcctcctccctccttccacctcctgccaggcctcctcttggctcccaacccgaagctggagggcaagggcagccatcagccatagtccacgtagtccgcctcccaagggcagagcagggtggagacggggagagcagatatagaccagaggtcaagtggaagagctctgcacagtgccctatggcacccccagtctgcagcccccacccagcctggagtcatgggcccccgcagtctggcccacctgccttcacccacaggccccccatctctgtccccataccctcctcccctgccattctgccagtctgcagcctgctcaccaaatacacaatgacctttgcacttcttttcaacttttcacacctcttccctttcccaggagtgcctttccctcctaggcctggagaaatgctatatagtcttaggatccagcctgaatccccttgctctctgcagatttcccttgcctccagttagcttcccttacggctgattcgacacgtacttcattacagtgcgtacttcactagggtgcacttcatgctgtggtcttgccagttatttgtggaccacttcctctatagaccagatcattcactcttgtgggtagaaactacaccatggtcatctctgcattcctttgtggtacctccaagtagttgaaataaaaacaagtgctcaaaaaattagttgcattgaaatgactgatgcaaagatacgatgaatatcatttacttggttaaaggtggtgttagttataaagagtagagtcagcatattcaacactgattaactatattgcatgttgtatgtaaccaagtcactccctaacttgcctccccccaacatacatctagatttagtcactgtcatctcctctggggacaccctttgtgtcacttattagaatttatctgtataattatttatcctgggttctacctcctcttctagatctttaactccgtaagggcaggggccatatctgtgctagtcatcacagagtctctagaccttagaacagtgtgataggtctttcatagctgtttgttgaatgaataaatatgttggtcataatacattataacatatcgtaaccttaaaggcctgcagaatggggactctaggtgccatggaagggcctatgaagttcctttccatgcccctcaaaccatttcctgctgctggaaggagtcatttcttgatgactccattcccacatcattagagcagccaccctttccacttgcatggaagtaggtcttgtaccaagaagaacaaatttccttttccttctgtcaccataaggaatatagtaatattgggggaattattctttttctgcaattcttttgcttcgcatttcactgtccttattgtgctgatttgcagtttcttaaattgatggtgccaagtaaaatatatttgattgtagtttgtaccatttcaaatcgatttagtaattttgaagatgtgtaataggcattatcaggtcttaaaattgaaaattggcatgattttatgtcattttatatcatttcactaatgtgatagtctagccagattctattattattgtcattattattattttgagataggatctctctttgttacccaggctggagtacagtggtgcaatgttggctcactgcagcctcaacatccccaggctcaggtgattctcccacctcagcctcctgagtagccgagactacaggcatgcaccaccatgcctggctcattttttgaattatttttgtagagacagagtctcactatgttgcccaggctggtctcaactcctgggctcaatctatctgcccgccttggcctcccaaagtgctgggattacaggtgtgagccatcatgcccagccagattttattattaattaatgagttcagggagttctttttaaaggtcacaaatgatgtttaataacatgaaaaaagattatcttttggaaacagaaagtagcaacatagcctacaagccttaatttatttaagccctactattactcactaatctttttatttgaggtttaacattctgaccaatatgttctggaaaggaaattaaactcaacatttgagataacagagctcttatgaagcttatatactggagatattggaaaaagatactaatctccctctcccctcaaaaagcaagaaagcaattagtctggagggactgtctaaataggattgtctaaaggaaaacctgcaaaaaaattgggcagatggtctttataaacttagagaagattaactccgcagccatgttgtaacaggtttttacggatgcatttgttgcaaattaattgcctcttttcggccttaataacctaaatttaagtttgggggtttgcatagaagcaattcaaagctcaatactgtcatgtttttcattaatttaccagtgagtggttgggtttgtatgaataatttgatttattttgaagttaaatgtaattataagttgtgttttgctaggcagcttgtcctttataatagaatttgccttgaactacaatataatttattctacccttcttggttaacagcctcttctttaggaaaaaaaaacacaggcaatatctgtgaagataatatttttaaggtagatgcaatagaatggtttgggagtctttcagtcttgggtgatagaagatcagatttggtacagatctggtatagaaccccatcattaggactaaaagcaggcaaaagcagaactgggccctcagttctcagataagctgttatacctatttgcagtttcttcaaaagtgagcatacatagacagttctactcccaggtaagtacctaagagaaatgcatccgtatgttcatggagagacatgcactgaaatagtcacagcaacactcataacggccctaactagaaactctatacatgccctttatcagataaataaatggtagtgtgttcacatcacggaatactattcatcattgaaaatgaacaaactgccactgtatgcatataaggttgagtgaaagaagccagatagcaaagagtacatactgcatgattccatttatataaagtataaaagacaaagcaatgtggccagatgcggtggctcacgcctgtactcccagcactttgggaggctgaggtgggcagatcacctaaggtcgggagttctagaccagcctgaccaacatggaccaacatgaccaaccctgtctctactaaaaatacaaaattagccaggcgtagtggcacatgcctgtaatctcagctactcaggaggctgaggcaggagaattgcttgaacccaggaggcagaggttgcagtgagccgagattgcgccattgcactccagcctgggcaacaagagtgaaactccgtcttaaaaaaaaaaaaaaaaaagcaatgtaggtgttagaatggtggtaagtcttagaaggtaatagttgaaaggaggcaaaaggaggtcttctggggttctggtgctgttctgtttcttgatctcagtgctgattatactgggtatattcagtttgtaaaagttaatagagcttatgatttagtataccatgaatattatataccatgatttgtaactcagctcctcttattaccgcttaaattttatttatttatttaattttttagggactacattatgcattaggcactttgatatacgcacgttataatttaataaaaagtaaaaaaaaatcagtttgaaaataaggcattgcaataatttaaggaagagttggtcaccatccttctgtgcttcacctctaggtgggtgcttcgtgctggcttatgagaaaaggaacaccacagcagtgcagaccattgaaaatgacagtgatccaaggttaaaggtcacacaagtatttaattgtctttaagcagaactttattacctaccaaaagaaactgttgagatacttcagcctagccatggtctttttgtgaagaaccataagcatttatccaactccccacctcctttgggggtcaactcaggtttcttggctcagtgaagtctttatagcacctctagcttctgttctctgtaagctgtaatttacagccatcatcaaaagagcatagtttagcggttaatactactttacgtattttatttcttttgaatattccttgaccacaagttcgttgaagccaacagcccacctttcatatctccattcaggagatatgaaaggctgtgctgttgcttacatttctggaaccatgtggtgactggccggcaaacatttaataaatactggacaagtgatggactgtggccttgaagaaacaggaagatgaacagaagccctacctgaggcagcagcaaagattcgcttttaagtgacagtagttgtgttgcttccctggagttgtctccatttcagttgccgaatccctttgatctctctctctctctctctctcaattttcttgtttacatgttcattgtagaagattaggaaatgtgaaatgtgaaaaaagcacaaagaagaaaaaggtaaacactcataatccttctacagagggaagctcttactattttgttgtatttttttttcttctttggcttttcctataatacatgtgctttcatgctctctgccccgtgttccccaccctttcttttcatttctttctttgaaacggagccttgctcttttgcccaagctggaatgctgtgcagctgtcttggcaacctccgcctacctgcttcaagtgatcctcccacctcagcctcgcaggtagctgggattacaagcgcgcaccactgcgcccagcaaatttttgtattttcaatagcgatggggtttcaccatgttggccaggctggtctcaaactcctggcctcaagtgatctgcccaccttggcttcccaaagtgctgggattacaagcatgagcctctgcgctgggcctctcttcatttctagagaataatggaagtgaatccaggagacagacttctccacattgttaaaagctcctcgggcagagtggaactgcacgtgttgccactttgattttctttactccaaatacaaaggtgtaacttggattaagatcggggctttcacgtcttgctggaaaatagtaagccataatttgtaactcagctcctcttattcaccacttaaattttatttatttaattttcttttttagagacaggatcttgctatgttgcctgggttggtctcaaactcctgggctcaagtgatccacctgcctcagtctcctgaatagctgggactataggcatgtgtcatcacacccagctacggcttaaatttttaagattagtttggctagtatatacattatgctccaaatcacgaaaaaaaagtattcttccggggtaaaaccatgcagtctactaatataatcatcctcagtctcatcctgaaagcagggatcatacaaacctgctcagcctgcatgtgtacccctgaacttaaaagctggaaatcaaaataataaataaataaataaataaataaataaataaataaataaataaataaatggggaaaaaagcaggtatccaacatattttagaccttaaaatcccattaatcctggtcctctcctgagaattataacagaagatttgcttttccaggtagagggtatctgagcagttgtgcaaggctgtgctgttgcttacatttctggaaccatgcggtgactggccagtgttgcatggctgacgtgtcctccttctcctgacctggagctcctgggctgctgtgctcctggtgcatacaccatacagtgctagtactcttgctctttcctcctaaaaatagactcctaaaacagtcctaaaatagactcctcggcttctctcctttttgactttttttccacgagactcctctgagcttgtccccagttttgctttagactcctgaaatatttatttgttttttaatatcttaacttttattttaggttgaggggtacacgtgcaggtttattatataggtaaactcacaactcgggtttggtgtacagattatttcggacttccgaaatgttgaaataatactcatttaaatgaggttgtccattggtaagaagaaaaatcactcctgcaaccctgacagactgtttctcctgacctttaaaagaccttaatgggtacattgttttgtttgttccgctctgccctggttgagggcaatgtgacatttgcattatctctctaggcctctgcttgattatgttgctataaattactgtctgtcctgaacagagtccatctaactgagtgtcctgctgcctgtaggaagagagagagagagacagagacagggagaaacagagagagagagagacagagacagggagagacagagagagagagacagagacagggagaaacacagagagagagaaaatagttttctggaaaagagaaaagaaacataatttggattcatgtctagacagagatagggagaaaaagagagagaaagagagagggggcaggtgaggggcggaatagttgtccagaaaagagaaaagaaacataatttagattcacatctttgtcatttccatttgctctaacgcttagcctacattcagttacctaaagtggtcctatagccctctcttctggaaccccattcatctcagataatacttctgtcattggcattgaggaggtgaaacttcaagtggtatttacatttgattcccttcagctttgtgacccttaggatccagatatctgcctactttgtagatgtgatatttatgttctgctgattttcagtgaacagtgctcaattttggggaaagcagatcgggagctaccattcctgtctgagccttctcctggaggccgggagggtgtcaggacttagcagggaaaagagctccctgcctccaggagaaaggtttatggaagagtcttcctgccttcaggagtgggttctcctatcctgtgagtccttctcttcaaatataacttttccaagttaatttttttgaatagagaaattagcatgtgtgacttttatgcagaagaacttaggaaagagattatttatataataatataggcaaaaaatgctacaaactcatccagctgggttacattctaatttgaccaatgagctgagtcaagtagcattctttttttgtttttttaattaaaagtacttgtcctcaatgtgaaaaaacaatctacagaagtacagatgtttgagaagagtaatggtaatgaaaacagtagttagtattaatcaagcttagtagcactttgcctggattgcctcatcccatcctcttacagttctgtgggctagatactgttgtgcaaaggtctttggtaaagatctgtttgatgtttttcaccctgtgtcttagtctatttgggcttctataacaaaatactgtagattatgtggcttataagcaatagaatattatttcttacagttctagaggctgggaagtccaagatcaaggtgctaacagattcagcatctggtgaagaccacttcctggttcacagagggcaccttctagttgtgcctttacatggtggaaggggcaggggggctttctggggtctcctttatgagttccattcatgaggactcctccttcatgacctaatcatctcccaatggccctatgtcttaatactatcaccttggaggttaggatttcaacatatgaataggggaacacattcagatgatagcaggctacccttctcaaacttattagaaaatggagtccttttttttcatggaagccccacaaccatccctgagaacataggtggtattctgcagacacagtttgggaaataagagaagtctacctctacactgctggctaggggttgagctgggaacagacacatttgcctcccctttgtactatctagctttccagattcttcccgctagttgtgttgatggtgatttgggattgttctttcacattcaaagctagggctatacactaattcattcattctcattcactaaaaaatatctaccatcacactgtgccaggagaccatagctagaacagggtccctgcctctgggaagtccccgtgccataagaaaacaaacacagatattcaatgggaggtaagacctgccaagtaccatctactgagcactgcagaagctgtggtgggggctggccagctctacctggggaactggggaaggcttcctaggggaggggatgggcacagcgtccccagggagcaccaggtgaagaaaactgggaagcagagagttgagaatgtgtttggcagcatgtgagtgccagggctttcagcagtgggggctggtggaggagcacagatggcctttaaagtcaactctgagtcactctctgaaattacagaaattcaaagagaaggatctggaaatcctccaacaagttatttgaccttctggtctctcaataaccatttggtatctagctgataaatggaaattctctgcaaaattgtgttatacaggaaaagttgcagaaaaattgttagagaaagaaaatcattctcctgccttcacctgtaaaccatagagctcacatttttcctaaggggctttatgctagcaacttgcccctggattctccattcatgcctcaatctactaacatgaccgatcggaggttaaataaaacttccaaagcaggaccaggagttattcagcttcactatgtaacagtggttgagatagaaactattttctgtctatttttttttctcgttgccttgacaactggttgttttttttttttaagcttttgatttttttcaacaacatgagctgcttcctttggttgagctgagacatgtgtacagatttatatcttattcagagagtctctagtgtaaatgtttacgagataccaattttttatttttcagaatcttcagtgttgaacagagtagataattgcacaaaactgttagcctgcctgattaaccaaacaaaggcaaatcagtagtgattttccatgtctgatgtcaaatactgtaaaaaatgattccaattcatttttacacaatatcatggaatattttaatatttggctttttaatgtccctgaccaggtctgtgtgaaagttgtttccatataccagaagtgcatgtcctccttcctgcactcccccttgctcccatggctctagccacagtggcctctcatccttgcaaagctgttcccatctcatggcctttgccatttcctctgcctggaatctgcctaccccggatattcgcattgcccgctccctccttgcatttatgtctctgattcaatgccaccttctcctcctggaccttcctgtctaaaacaccatccttacttgtcactggccagtcaggacgtgggaggatccctctctggaaaaacagttcagtcatcctatatgaaactccccagaccataagccctacccatagcaagagcttccaatgagcattttaatgcctcacccttagatttgaactcacagccaaaaatcaccagctatttgaggaaatcccctattacaaaatatagagaccaagactgataaataaagaacttaaaagaaacagagacaaggatggagcaggagaaatctgcaacaaaacaaaacaaacaaaaaaatggaaaatggggcaatggggcagaggaaggcatcctagaaatcatacaagaaatataggagtggaactgagtggggcccaggtcagcagctatggagcaagcctggagggcagccaggccaactggagcaataggacagaagattctccgggagggctggggtcctgaggagctatcgcaacaggctacatgtggaaatttgtattgagaggctattggagggtatgggtaaaattaggatacagttgactcttgaacaacagaggggttaggagtattggcctcccctccgcccaccacctgcaataatttttgactctccaaaaccttttttttcttccgcttttattgtaagctcagggttacctgtgcaggatgtgcaagtttgttacataggtaaatgtgtgccatggtggtttgctgcacacatcatcccatcacctaggtgttaagcccagcgtccattagctgttcttcctgatgctctccctccccccacacaccccccacctccaacaggccccgctgtgtgttgttcccctccatgtgcccatgtgttctcatcattcagctcccacttataagtgagaacatgcggtgtttggttttctgttcctgcattagtttgctgaggataatggcttccagttctatccatgtccctgcaaaggacatgatctcgttcctttttatggctgcactgactccccaaaactttaactactaacagcctgctgttgaccagaagccttacagatcatatgaacagtggattaacaacataaatagattagtatctacatatgttttacacattcatgacatacctaatttttcttatttttttgatatttttaggctacgcaatttgtctgcaagttttttcaaattgttgcaaatctccaaaacattttccaatatgtttattgaaaagaattctcatataagtggacctgcacagttcaaacctaccttgttcaaggatcagctgtagttacaaaacaaagcaggcaaagacggaaaaaaaatacctatttaccacagaagcaataacattgtacagtaaatgaaacgtagtacatttagtagcgatcaatctttgtatagttatgatagtataaacactgaatattgctctaataaaaattggatatgagcatatttagagaatggggcaagggaagcacctgtgtatctgtgcatatatgagtttgtgtgcatgtgtgtgcctgagacttatatgcttacctgctgtaataggatgtcaacacataatgtctaaaactgatacattatcatatatgagcatattaattagacatataaagattttaaaagccaaaaggaatagtaagttggagtggtagattatgggaaatggaaaggagaatggaaggaatagaaaacttctttttcattgtaagacttttagtctcatctgacttttaaaagctatgagtatatattatgtagataaaaataaaaattagttatgaattaaaagataaattttggcagggtgcagtggctcatgcctgtaatcccaacactttgggaggccaaggcaggcagatcacctgaggtcaggagttcaagaccagcctgaccaacatggcaaaaccccatctctactaaaactacaaaaattagccaggcatggtggcaggtgcctgtaatcccagctactcgggaggctgaggcaggagaattgtttgagtctgtgaggtggacgttgcagcgaggcagaggttgcagtgagctgagacggcgccactgcactccagcctgggtgacggagcgagactctgtctcaaaaataaataaagaattaaaaataaaagataaattttaagcagccctgcttctgtgtacatgtcactgatagtttgatgtgcatttgattaatattaaattttgtccagcatgtggctgatgtccttgtcaggctcatgtgtttaactaaacccattttaacttgctcctggagtaattaactcagactcaccttgctggaagtcatgctgaagatatctatcatttcctcctacaccatggagatagattggactgtggctcatgctagttgaggttgtatgcttattagaaatggagtagatgcatgtgatattaaattgagctctttaatttctttagatttaatgacgtacctttgtcatgtacttaatcttcagcaaatatttacccttccaaaactggcagatttgcattttacaacttgtcatgtcaaatgaaatattttctcttttctttgcccctagaaggatttctgctcaaaattataatcttttaaaaaatagctgacacattctcctttgtggggaatattcaacatttctatcctgtgatttgaaactgacccttctcacttctctccagctttagcctatacatattgatatatttattttggatacagtttaatgtttttattcttatatctgggtcatagagagatgaatgggtaaatgaagagatggatgaatggataaattagatagaaagatagatagatagatagatagatagatagatagatagatgatagatagacagatagacagaaaagcagaccaaagtataccacagatgtgtggaagtacatgttcagataacagaaaatacactgcaagctttagtctcaagctccctagaccataaaagcttatagaatggtcagctttccaaagcagaggctaaataactgtcattctgttgcatccaacatagcttcccaaactttgttgatgtaggattagtaagatgttccattagaaactcctaaaataacttcaggatgcttttaagtattcttttcatttgtgccatggaactaatgtgaggagctggcagttggaggtggttatcgaagcctgggaatggatgtctccagtcactgtttggtggaagaacctttttcaggttgtccctgcgcccccacaatacttgagaacactttctagaccagaataaaatgctcaagtaaattaatgacatctgtttgcattttgaagatgagaaactgtgagacttttaattcctagaggtaatagcaggataattgagtacagtaaattagaagttgctatttatgagcaaaagtatgtatgactagagacttcatccccatgagcttgcctgttcaccatattgttattttcttgcatgctttattagtctttggagccatacttcttgagtttgaatcctggctctgccacttaactagctagctgcatgcctttgaacaagtttcgtaatctctgtgcctcagtttcataatttgtgaatctgttgattagtccactcaatacctattccaatccccttttagcttgattttttttttcatctgacagagaatggaaactttccatttccagaatccctcaaagctactgttcagggtttgttaactaaatgcatttccataaacctttgaattcagatctagattgtgtgggatgagagatgggacataggaccttcattttttgctggtatggatagtggcagaggcagcatcgttctggaactagtcgctgtagtgatagcgtcctgatttaacagtcagcttttttattgggaagcttccagttgttagtttggagcaacatctgaaccggcagcttcctaattctttaggttcttaatagtgatcaaggcaacagcccctttggccgttcatttctgctgaatggtttaagaagtaattcctaaaagctaggcctaaagtccatttctgcagctctcctaacaatgatgtcaactatgtgttccttaatatgtctttttgcttgaagcagccaaagtgatttatgttggttgtaactaaaaacccagaagaatcaacttacctaatagggcttttgtgagttgtaataaggtaaggcatttaaagtgcttagaacattatctggattgctatttcttttttttaatattcttagggcttgttctggccttagtcaatggaacacctacaaccataaataaaagatatttattagtttctttgttcattcattcattcatttattcattcactgaaacaaatatttagtgaatgtcttgtcaaggcatgtttcagtagccttaggatagtggttaccaattagaaccatctaggaatctttttgaaaaaacttaatttctatgccacatccataacttactgaaaatagcgagtgtgtgtgtgtgtgtgtgtgtgtgtgtgtgtgcacatgcatatgtatacataaatatttttttaattggaataccatttacatatagtaaagtacataaatcttatgtgttacagtttggtgaatttttatatatgtgggtgtatacccacataaccactacctagatcaaaatatagaaaaacagaaatttgcatgaaagatttattgtgtgcatgggtgttttgggggccccattaggagctaaagcttcaaatgcatttgaggttttgccacttagaggtcaaaaaaatttagtcatccagaatgaccagtataattaggttatttttcatttctttttcttcttcatagcatccttcaaatttgtattcctttttaggtttatgcatttatatgtgaaatgaaatttatggagaaccttagataacagaaaattctaaaatgttaataaggcagtaaatgttatcagtaataactccatgactcataatttctgcctctgtttatcttatgattggcataatttattgactaaaagtacatttaactgctttcttgaagcttaaacagcttctttctcatgatctcttcaaagagtgaatatcatgaaagagtagaaataattattttcccttttttccaaaagagtgtttggaatagatatctttgtctgtgggccaatggctgcacactcagtagtgcaatgcagaggctattagagcagcacgcatgagctgagttaggaagataaagttacttaaaaagcaaatggaaatagttgactatggagaaagagaacattgtctacaaaacattaatagcctttacaatttttataaaaccaacctagaacaactttgaagttgaatgattttgcataactggcttattatggaatgaaactttcagaaacaaaatatagagtggagatgaactgtatacttttaagatgatcacgtgtgatttgagatcagagtctagcattggaatactgtttcaaggatagctggactaccttggtgaattaaatagatgtgtcactaaaggaatagaaaaccttgaaattgtatgtagctccttcctctaccttcagataaaatttctgtacatcagcctaagtggtaagaatattgtctatttcaagcacttttagaaaatgagctttggatataagggcaatctgggtatgacatttattattttggtcgatctggccagttaagagactgatgtcttaactccttcaccattgcctgcacgtccctaagttggtaattattttcttggaactttgaaggtcttgtttcattgccttcttgtttacagaacattgtgattaataaatttgaggatttgtgctttatcagttctgagaaattcccacccattaactcgttgtctcattgtgcattgcctttccttcgttctctctgttagctctttctgaaattccaattacatgcatgttggaccatctcactttgacttccatatctcttatttttttctctatctctctctctatgctaaattgtaagtaatatcttcaactctgatttctattttctaattatctttccactggactctagtcttgttttacctatttgctgaggtataaatacctattactatattttttctttttctgtaatttaacattttctcattgtgctttttgtttatttttctcatttacctgttcattttttgtagtctcttgttcctaactcaaactttcaacttcccattttatttctttaacatattaagcatatttgccttatatcctgattgtgttaacgccaatatctgaagccaccatgggccttgtttgctggctcactttgcttactcccactcggtaaaggtagatttgttttttccctgtgcattttgagctcatgttcaatggaactctgtgtggacggtttcttttggtgtttggttgaaagtacatccctctaaggtttacgcttgctttcactagacatatgagggcatgtcagtctggaaccatattaaaataaatagctggcttagaggtttttagaccacaaaaatagtttcaatttgagcacaaacacatgtgagttctggctcatgatcaattgtttttttcttttttttttttccttttattttcttttatcaggttaaatcttggggcagatatttcttttttttctctctctctctacccagagccaaggccaagacaagtttttgtttgttttgttttactataaccttttacaaggcgtattttgttctctagttcactttttctctggtggcgtaacttcagggctctcagctttatgtggtgatttcttgttaagcacccccaccttgccatggccctaggctttgtgtcctgaaccctgtgtggacgttgaagctgacatgctaggtctagacaccagctcagggtttgcagacctctcagaacttctattctcattttgcttttggtctgtacaggctttccttgctttgttaccagctcagtcaaacattttaaaagatttttcaaaaatattttatccaacagttttagatgtttggtaacaggaaggattttcagaatatcttgtctaccatattcttttgtcaaaaataagtaactatttctgtgaccacactagaggtatcctcgcgaaggtggaaattcaattccatgtattcctcacttctagcccttaataactcatgttagaaaatttcccaacacaaatgcatcccaaacccatctttctctgtcacttagcctcagttttcacttgtcttctgtctatattccttttctgcgtaagttgtatcacgcaaattttagattttgtggcttttttccagtttctttgagttttctgtgttctccaatgttatgtgcttcaggagagaaggctcaaagctttgctctccttaaattcaagtgtaaatgggaggcatgggtgttgagagtgatctcctataactgatctcatggtgtttccttcttgtcttgcccgtttaattcagcgctgtgattctgactcagccagcagtcattctgtgaactctagatcttctctgcctattttcacaattttttgttttatttttaatgctgcctgtttctcttcttcagtgtatttactaactcaaacttttcctgaagctctttgcttgattaatagctgtcatcaacttacaaaaaccactgccaccatcaggctctctggaggttgagtcatttcagtcccacccacatcctggtgcaggtcccccttagagggatgtgtttggggatggctggagggctctaccagcctgggcttctgtgtttgacactcccacacactgaggcacctgctgtttctgcccacactaggatcatgtttactttgcagagggtgcaccagggacctctgtataatcatagtcctcctgctgtgagatgggtaatgttcactatgattcatcccttcaactctaatgccaggatggggcagtagctattggtaaggctgatgttccttccagttacagttacaaataaatgcttgtttgtctggagtttccttttgatataatatctatcactgtgtagtagacatatatatatatatatatatatatatatatttttttttttttgagacacagtctcactctgtcgcctaggctggagtgtagtagtgcgatctcggttcactgcaacctccgcctcctgggttcaaatgattcttgtgcctcagcctcccgagtagctgggactacaggtgcacgccaccatgcctggctaatattttttgtatttttagtagagatggggtttcaccacgttggccaggctggtctcaaactcctgacctcaggtgatccacctgcctcggcctcccaaaatggtgagcttacaggcatgagccaccgtgcccagccagacatatattaatagaagcattcactattcactttgaaaaatcccagacgttaaagaacaagtaccttaatactctaacaactctgctgtgggtactattcttgttactaaggtactaattataaagtatcttttatttattgagcacttagcatgtgctgggcttcctgctaataaatcatttaatccttacaagagccctatgaggtaggagctgttactaaccccatcttatagatgaggacatggagattcagagatgtgaagtaacttgcccaggatctcatagccagtaaaggacttgctaggactcaaactcaaggcttcttcccaagtccatgctcacagacatctcttctcttaggacaaaaccagatttctgatctatggcaatgaacttttgcaaaggccagaacttaagtctaccttacaaggtaacatatttgaaagtaaaactgtgttgcctgcattgcacagaactgatgttagaatacctttgcgaaaactgctttgagaaccagcatgtgtaacataagaaaatcaattttcttttgtagacaaaccttgcctttcaccccaggccatgttatcctgcttgatcacctacattatttacagatttcactcctcatgcctcttaacagtttctaaaaaggagattctgtcccctgaggatggagatttgtcaccaatgaggacattcataagaagcttccagagggagtgaagatgactcctaaggggctccaacaggttctcagcgatgtcattttacaaataagagctcggcccttggggtgattactttaaaggggaagtgctcggctgtatcagtacattctagtgtgtttgtttacaatccattctctgacttcatagatatacttaatgtcgacttgatatggaatgaaatctgtttacaaaaatccacatctaacaaaacttctatggcatatggaaaaacgccagactttcctcatctattacagatgttaccttctctgggaaaggcttattgcaaatgtcaacactgaaactggctctgttttgatagaaatcttgttctgtttctctttaaatctaagaactaccaaatattgacttgttgatttggacagattgtgggaggcccacaatctcctcttgaaggaaaaaggatcaggtttctgcttccccaggaaacggggaattatctctctgctgaatatgtatgtatcaagcaaccctctggtgtcatttttaaagtgcttatatttttcttacgcgtaaggttgacgtttgaagcatcatcttaattagctgctcacatttaatgtgacttggccgcagtaaacagtcgtaatcaaaatagcaatgttgccatagcaaccaagatccaactcaattgcttttcctttctactcacaagtgctgcttaccatctaggcaaggatatgaaacaaatctactgaaacctcgtgtgtgaaatgaaagtttaaaaaccactggggaaaaacatccctgaatgattgttttaagtgtttcagtgaagctcctggctccaaatggctcctgaaggaaattgcctccctggttctcttgtctgacagctttgcctcctgagagctgttccccacacgtggacgggatcgggggaaccatagatttattccagctgaagctgcaaggtccagaaagtgggagagttgatccagataattccccatggcttttctagctataaagtgttaggttccgatcctttaacttggttatttctttattgcaaaatgcaaaaccacgctgttttaaaacaagcctcggggtaagcctcagtttcatggaaaagaagacagaggattattaatcatttttatgctgtaagccggtagttcctaaatttttattatctgaatcctttagggaagccctcgaactcccctgctcggcccatcatcaccagcacttgttctaatgacgtcaaatgatagccatatgaagatcatattagggttttttttttctttgttgttaattattgcatatcttggtatgaagatcatattaatgaagaaaattaatgagcagatagaccttttctgtgttctaattgccaaccccttcttccagtgatcctggagacttggtcttggtctcaattttctcatctggaaaataagacacagtagagctggatattttccctgctcttggatccagcttggtacatgacttctttattaaatagaatagaaaaccagtatcacctttggtagtgataagccgatgccgtgagggttgttttgcttgagaaaacaaaaacaaaccctgtggcttctccggaggtccttgtttcaccctcaccttctttttatcgctttccatgtaagagacggaaataatctaattgtgagattaatcagagaaatcagacaaaaatgttttctgtgtaattcattttgtatgccattaaaaagaaataagataaaaagagagagtgaaaaaaagtaggaacatggtcaataatatgaataagcagttcacagaaaaggaaacacaagtggcccctaactgtatgaaaagcagctccgccatagaagttgtcagggaaatggaaacccaaattggagatacaactttagtgtctgacaatatcagaatttggcaaagatgtggagaaacaggaaaacccaaacactgctggtgggggtgtgattgttattctacaaccattttggagagcaatttggcaggatctagtcaagtcgaaaatgcacattcccttcgattccataattctccttttggatgtatttccggagaaagtctcctgatacatgtgcacaaggcggtatttatcaggaggttcactgaggccttatttgtgatagtgaaaattaaatatagcctacctgtctatcagaaaagaatggatgaaaaataatgtagcatgttcctatattagaatactatagagcagttttacataatcagcaatggctaaaagtaaaacatcataaagtagcatgcaaaactttgtattttgaaaacaaaatgcaaaactttgcatattgaaagttaaaatgactaccacacacaaagcaacactcttgcatatggatacatatatatgtgtgtgtatgtgtgtatatatttatatggtatcaaaaatgggctgagggctgggcatggtggctcatgcctgtaatcccagcactttgggaggccgaggcgggcagatcacttgaggccaggagtttgagaacagcctggccaacatggcaaaatcccctctctactgaaaatacaaaaattagctggatgccagctactagggtggctgaggcacaagaatcacttgaacccgggaggcagagattgcaatgagccaagattaatttttaaaaagttggggaggggcttttggtcaatgtcaaaaccacaactacttttgcaccaacctataatatctgtgaagaaacagtcagctttaagtgtttcataagaagaaagttttgaagcaaataggacaatgtgttcattgccaatttggggtggtgtgagcttggatgttacagttctctgttaatttttcaagaaaaatataaaatgccaaagtagaagattgcttacaaatcagaacattggtcttattaaattgccctggcgcctacttttaggactatttactaaacacacctgtctttgttttttttccggcattcattttattcctccgtggtggcctcttagaggaccgcgtcctctgctcatggcatctgtgtgtcattaggatgaagggtgatagcatatgccactttccctctgagtgattcatccagtttgaactttcagatataaacaagtacagagactgtggtttcaaaagcacctgaccaaaccatccatccctttgaaatgttaatttgtattaaatatcttgatatccacacactctcactttgtgaggatgtggttttgtcctttaaaggaacagttgcaaattctaaaatatatgaatcgtggaaggcagggttgctattaggaaaaaggaagcttaagtttattgtttttctgtaactaattttatgtaactaataagataggatgtaaggtgccctagaactccaaccctggtgttacgacgcagcagggaaaagccagactaaaccagaaagagaactccagcgaggtgccgatggttcagagtgaatcagggccaattcacttgctggacagtaaccaaaaggtttgtacagctaggaagtgggagaaatgccagtggtgaaaacagggaaaaggaaaggaggattggcttggagtgtcataggacaaatccgtggaggtttagccaaaaacaaaagtctgtagacaccttattgtttataacatggactgggatgatttccagcatcaaatctcagccctctgggacataactgtgtggtaggaactttccactgttaacccaggtatatcagccccactcctccagcaccaggttgcataatgtgtcataatacatgtatacatgtaatgaattgtgtgatcaagggccctctagaaaatgaaaaggggtgccattaataattcattgaggggccgggcgcggtggctcacgcctgtaatcccagcactttgggaggccgaggcgggtggatcatgaggtcaggagatcgagaccatcctggctaacaaggtgaaaccccgtctctactaaaaatacaaaaaattagccgggcgcggtggcgggcgcctgtagtcccagctactcgggaggctgaggcaggagaatggcgtgaacccgggaagcggagcttgcagtgagccgagattccgccactgcagtccgcagtccggcctgggcgacagagcgagactccgtctcaaaaaaaaaaaaaaaaaaaaaaaattcattgaggctagggtgat[134 bp omitted]ataataattaactgagacaacaggcctaaaccaggactgtcctgggcaaactttccagtcactctattgagtaccagtccctctagtaagagcacacgtttatggaaaggaatgcctgaagttgaaaggttagcagaagtgtttacctggcttcttagtctagcccccacgccctccagagcctaaccccatttcttcctctcttgtaaggattctctgcaccttccagaccacctctcactaggctcttgggcattctcatgtctgcacctagcactgggcttcccctccctgaagtaactttcttcctcgacctggtctgtctgaggatgacttgccttcccagttccagctttttttagttttaatttttttttttttttttgagatggagtcttgctctgtcgcccaagtgggagtgcagtggtgtgatctcggctcactgcaacctccacctcccgggttcaagcaattctcctgcctcagcctcccgagtagctgggattacaggtgtgtgccaccacacccagctaatttttgtatttttagtagagacgagggtttcaccatgttggccagactggtctctaactcctgacctcgcgatcttcttgcctgggcctcccaaagtgctgggattacaggcatgagccaacgcacctggcgcccagtcccagctttacttctcatccggctttactctgcattgcctcctggaacttggccatccttcactgagctgaacctgtgccttggctggtcgatgctccataattattgagtatgaaagggagggacaagtgggccactttggaaggctggtccttgcttctttgcaggagtggtctccaggggcagctggccaaggaggacaatacagcacacagaccaactagtatggacgtctcatgctctctaacagtgggggacattgtagcacagcacaaatcaacatggctgccatccgaatgccacctgatctctgggagcttcaacacaaatcttcaggaaagattattggaaccaaagctttcttaaaccacaactataaagaatgtctatccaggaatggtggctcatatttgtaatctcagctacttgggagcctgaggccagaggatcacttaagcccaggagtttgagaccagcctgaccaacatggtgagaccccatctctacaaaaaatttttaaatattagctgggcatcatggtggtgcatgcctgcagttctagctactcaggaggctgaggtgggaggatcccttgaacctaggacttcgaggctacagtgatctatgatcatgccactctgctctagcttaggtaacagagtgagacccctgtctccttaaaaaaaaaaaaaagaaaagagaagtctacaccagccgttgtccaataaaaatattatgtgagtaacataggtcattttaaatgttctagtagctatagtttaaaacataaaacaaaaaagaagaaaaaataaaaacctaaactattaattttaataatatgttttatctaactcaatatatccaacatattttcattttaacatgtaattgacatttttaaattactgagatatatatttgatatcgtttggatgtctgtcccgtctaaatctcatgttgaaatgtaatccccagtgttggaagatggggcctggtggcgggggggcatttttaaatttttaattaaattttaatttaattaaaattaaattaattaacatctttaggaaatatccctgagtagtattgtgtttgggccatgagggtggatccctcatggcttggtgctgtcctcgaaatagtgagtgagttctcatgagacctggctgttgaagagtgtagcgtctcacaccccactctctctcttgctcctactttggctgtgtgacatgcctgctccagcttcaccttccaccattaataaaagctccctgaggcctccttagaagcctagcagatgccagcgccatgcttgtacagcctgcagaactatgagccaattaaacctcttttctttataaattactcaatctcaggtatttatttatagcaacacaagaacggactaatacaatattattttttcatcctaagtttttgaagtctggtgtgattttctgcttatggatccattcagactggctacatttcaagtgcccagtgctacatatggctagtggctgactgctgtattggacagtacagatctagatgcattatgttgctcaaatcaccttcctttccttccttcctttccctcccttccttccttccttccttccttccttctctctctctctctgtctttctttctttcttttgagacagagtattgccctgtcacccaggctgaagtgcagtggtgtgatctgcaacctccacctcctgggttcaagacagtctcctgcctcagcctcctgagtagctgggattacaggcatatgccaccactcccggctaacttttgtatttttagtagagacggggttttgccatgttggccaggctggtctctaactcctgacctcaagtgatccgcctgcctcagcctcccaaagtgctgggattacaggcgtgagccactgcatctggcctcaaatcactttcattagagtgtgtagacttccttacttttattgctattataaagttttttaaaaaaatccttgaactatgtcagtctttaggaaatatccccgagtattatgtgtgttgggactagagaggagtttggctactcatacttttaacttttgttgcttgtgtttctcattcagaagtggttacctttgtttcattcatttgtttattcattccacaaatgtaccaagttcctgggctctggaattattaaacatacaggaaagaggtctattgtgtattaaaggtttattatgcctatgaaaataaaactcatcaaataaaaacatccaaatttttaaatatactgggtatctaccatgtgccagacactgtgttaggccctggggaaacagcaggtaacaagagagacaaaaatccttgagtgggagaagatagaaaataaacaaatggtcgggcatggtggctcacttgaggtcaggagttcaagaccagcctggccaacatggcgaaaccccatctctactaaaaatacaaaaattagctgggtgtgatggtgcacgcctgcagtcccagctactcgggaggctgaggcaggagaatcgcttgaacctgggaggcagagtttgcagtcagccaagatcgcgccactgcactccagcctgagcgacagatcgagactccatctcaaaaataaataaataaataataaacaaatcgtgtgtgtgtgtgtatttaggtgatattaggtttgttgtttttcattcaagaccttttatgaaaatagttacaaggccacggttatctgttttttccttaatctaaaactttgactgattgggttgtttaggtgacagagtgatccaaacttttattactgatgtaagtataccctcagtagtgtagtccagggttgggctgctgtcatctactaacctgcccattagtgtcagaaggtttgcctgggtattccctagactatgtcccctgcctctgttgctcagggtgatctttgataaacaccctagccagcactgcaaccaccttttatttgcctgttcataatagcagagtctccacgtctactttttttttttttttggagatagggtctggctctgtcgcctaggctggagtgcatgatgtgaccactgctcactgcagcctccacctcctagcctcaagcaatcttcctgccttagcctcccgagtagctgggactataggcattcactgccatgctcagctaatttttttttttttttttagacagagttttgctcttgttgcccaggctggagtgcaatggtgtgatctcagctcactgcaacctccacctcccgggttcaagcaattctcctgcctcagcctcccaagaagctgagattacaggcatgttctaccatgcccagctaatttttgtatttgtagtacagatggggtttcaccatgttggtcaggcttgtgtcaaactcctgacttccagtgatctgcccacctcggcctcccaaagtgctaggattacaggcgtgagccaccacacccggccttatgttttttggtatttttttggtagagacagggtttcgccatgttgcccaagcttgtctcaaactcctgaactcacgtgatttgtccgcgttggcctcccaaagttctgggattacaggtgtgagccacagcgcccagcctccacttctgctatgataaaattgtgttccttggtagaagcattcctccttaagttactaaggcttctaaactagcagaacacagaaacccaagaaaggcaatcaagctatgagtgggactttagatattagctttgtaagaaacgtaaggcagggaagggagatagcgacagccaagactcaggggagtgggagaaatgtaatttttaaaaaatatgataaaatgcacataacatgaagtcttaatcattttgaagcatatagttctgtagtattaagttcatttgtattgttgtcaaccagtctccagaactcatcatgtaaaactgaaactctgtacccattaaacactaaatctgcattttcaccttttccctctccccagcttctggtaaccaccattctgttttctgtctctatgactcttttttttttttaagagacaggtcttgtgcagtcacccaggctggagtccagtggcagtggcgtgatcacagtccattgctgccttgatctcctggactcaagtgatcctcccacctcagcctcccaagtagccgggactacaggcatgaaccaccatggccggctaaatttttaattttttttttgtagaggcagggtcttgctatgttgcctaggttggtctcaaactcctggcttcaagtgatcctcctgccttggcctcctaaagtgctgggattacaggtgtgagccatagcacccaaccctgtctctataaatctgaccactttaggtacctcatctaagtggaatcatacagtatttttcctattgtggctggcttatttcacttagcataatgtcctcagggttcgttcatgttgtagcgtgtgtcacagtgtcctttctttttaaggctgaataatatttcattgtgtgcacatactaacacattttgttttattttgttttatttttgagacagagtctcgctctgtcacctagactggagtacagtgggatgatcttggctcatggcaacctccacctcccgcgttcaagagattcttgtgcctcagccacccgagtagctgggactacaggtgcatgtcaccacgcctggctaatttttgtatttttagtagatacagggtttcatcatgttgcccaggctggtcttgaactcctgggctcaagagatccactttccttggccccccaaagtgctgggattatagacatgagccgccgcacctggcctgccaaccacattttatttatccatttatctgttgatagctgggttgcttctaactcttggctaatgtgaatatgagaaatgcaatttgaaatagtgtgcccaggaaatgtatggtaaactgaattattgttcaccaatattctctgcctctccctacaggatattctttcatcctcatccttttgaaatcaggcttggccatatgacttcacgttagccagtgaaatatgaacagaagtaatagagctgtcccagtcactgctgatttccccatactctttttcctctgctatagtcactaggcaatgttgagatagtagctgctctgttggtctgggttctggagtgagggtgaggatgaacagatctacttgtatatgtgtatacttgtagtatgacacagatctctgggtaatgagaattaaccctttgctgtttcatgccctggatatttggggcttgcttgttaggcagcataacctggcccattctgactgagaaggcctcactgattaacgtctgagcagagacctagaggacgtgatatgtggagcaagcatgttcgatggcagagcaacagcaagtgcaaagattctaaagagaagtttgtttcaaggctcaggaaagaagccagatttatgaaggaggcagtgaaacagacagagtggtaggtgctagtcagactctcatgcagcccatagggctgggctggaggtgggactgaatcttgttcacccaatgattctgttccctcctcctttcctccatggagcatggaatgggtggcagtagtgagggggtagaagaaggaatgaaggagaaaaaagtgaggcgtggagcaggaagatgcagactagcccagatccatggcccatggcccctcatatactaaaaatgatagtatcacacatggaggcaccttatccagggcatggtgaggcttctgaagtctgacttctgtcataagatgaatagtgcatcaagagttgctgataagtgatcattgatgaccggaacatcccccactactccctggttcaccttgtcattttcatgcctgtgactttaaaaaaaattttcttttaattttattttttaattggaagaagcattttatatttgcagttcaactgataatgccaacacttgttactgtacagcacattacaggatttgtggttgcaaaaagttacgtaatttaagtttactggtattgctactcacctaagtctaaactaaatcttatgttcccatttgcaatttaatttgtaaattaaaggttttgtttgtttgtttttgtttctattttgttttgttttgttttgttgaaacagagtctcactctgtcgcccaggctggagtgcagtggtgcaatctcggctcactgcaacctctgcctcccgggttcaagtgattctcttgcctcccgagtagctgggactgcaggtgcccaccaccatgcccagccaatttttgtgtttttagtagagacggggtttcgccatgttggccaggctggtctctaactcctgagctcaggtgatccacccgccttggcctcccaaggtgctgagccaccacacccggccaaattaaaatgttttaaacatataagtccattatgaacattagtttaaaaggggacccatgactatttttagagccacacaagcccagggagcctccaacagaccaaccaaggaagcggggcctgggaacttaggagtgtgccatgcagggccctgaaaaagggacagcttcccatccaagcagcatagaaggaaacctaataagccacatactccttctttccttaaatcctgatactttttcatttttaaaaacttaagtcttggtcaggtgctgtgtctcacacctataatctcagcactttgggaggccgaggcgggcagattacttgagctaaggagtttgagatcagcctgggcaacgtggtgaaaccccgtctctacaaaaaatagaaaaaagttagccggacctggtggcatgcacctgtagacccagctactcaggactgaggtgggaggatcgcctgagcccagaaggtgggctcaggcagtgagctgtgttgcgccatggcactccaacctggggacaacagagcaaaaccctgtctaaaaaaaaaaccaggtgccctggctcacgcctgtaattctaacactttgggaggccaaggcaggtggatcacgaggtcaggagatcgagaccatcccggctaacacggtgaaaccccgtctctactgaaaatacaaaaaattagccgggcatggtggcgggtgcctgtagtgccagctagccaggaggctgaggcaggagaatcacttgaaccccggaggcagaggttgcagtgagccaagatcgcgccactgcactccagcctgggcgacagagtgagactccatctcaaaaaaaaaaaaaaaaaagtcttagatttctttcagctctgtaacctccttgaaaccatacataggtcctcttaatcagcaattgctagtaaaagaaactctggacaatcaagcagggtgggtgggtggctattgattcagatgcatgcagaaggcagaattctaaatatcaaatctatttagtagaaacttgttacagttgaaggcaaaaatgtttcacggagatgaaaccctgctgtgcatttatgaaccacagaaatagccatggaaagttctctggaagaatccctcattagatatctgggtttctaaaggctaatggcatctcttgcagaacacaactattaatctcaagtgctccatgccagttgactgtcttctgaattcaaataagcacctacaactcctaaatatataaaaatatttttaggtgtataacaatctcaagtatcaggctgagcgtggtggctcatgcctataatcctagcactttggaaggccaaggtgagcaaatcacttgaggccaggagttcgagaccagcctggccaacatggcaaaaccccatctctaccaaaaatacaaaaaattagccaggcatggtggcacacacctgtggtcccagctactcgggtggctgaggtgagaggatcatttgagcccaggaggtggaggctgcagtgagttgagatcatgccactgcactccagcttgggtgacagagtaagacttcacctcaaaaggaatctgaagtatctatatgttatctcttttcttgttggcaaagagaaaatttaacaattggatgcatgcaaaagcattgtgatatcaagccctgccctcctccttttcttcttgtaaatttctaaagaaatcctattcatgatggaaaatatataaaaaggcaagttccattcaatttaaataataccagaatcactgggaccagggccaatggttttccccctcaaccattgttgtggggtaaaaaagccatctcatggtctgagaagggaaaatgtgtaactcgaataggtaccagcaagaagggtgctgtgcagggaatggggaccaacagcaaaagtctcttagggagctcaaggcaaatcaacatattacagtgcagcgggagtcaacattgagttcccactcctttcaagatccatcctttgacccaggggaggggtgaggggcagggggacattattggtatttgggagatggaccattctttgtttgtcctgtgcactgtagaatgtttacatccttgaccccactcactaaatgcaagtagcactttgcaatccctgacacaaaaacatccctagactctccctgaagacgttgctatccccctttgacagctctacaaggttggaatataccaacagagagaataaggtggggtttgaacgtaactgggaggatgcatcactgagcacgaactgactagtaccatcattctttccacacatggacacatcaggaaaggaaaagcaattagctacatttgctggcaaagaaatggtgacatccaaaagctacaacagccttatgattagagaggaggctttatagttggtagtaaagcaaattttaaaaggaaatcaaaaactgaaatggactgcaggcagcattcaaaataactgacatagtaaatgactcaacccgtatgtcattggtcttctgaaggggaagggttgtttctctgaagacgactggcagactgcctgacatgtgcatgaaaagtataggagacagctagcttttagcctcttttgtggacactggatttcaaaatttttaaattaaatgaaacacagatgaaaattttaaatcctgcatatcaaagcacattgacaatttacttaccaagtacgtgccatgttgcttggcgttttctattgtacgtggacagttttgagggttcaactttcccagtgttgttggtgggcatcccccgctctctcccacccaccccattggcccttcccagcttctgtcttccagccaccacctcccaacccctacccaggacaaggtcatctgcgggtaagaaggtaggaagggacccttcatcctgccatcacgggaccccattccctctccttctcccttcagctttctaacagcagcatcatttgttaggcaattacccaagctaaggcttcttatttggttgcttgatattaaagtaggccagcaaaggaagtttttacatctatccccccagaggtttgttttaatttttttacaacaattttttaaaacaaagagcccttttttatgaattatttgagatttgctcacaaaaaatcaggccaccaatcctgatttttctacaaacaaggacattctcttctaaaacaataaaatcatcaaaatcaagaaattaacagtgatgcattactaccatctaatcctcagaccccattcacagctctccagttgccccagtaatgtgctttacaatgaaaagatgaagtttaaaaaaagtttttttttgcatttggctgtcatggctgttttagcctccttcattctgggacagtagctcagtccttccttggttttcacaaacctggcacttctgaagagtacaggccaagaactcctctcctgctgcttctatgccatcagaacaagaaagagaccagcatctgtctccctccccttccacccatcctggaggcttcagtccagtgatagtgttcttgggaagaacttgggtaaaagctctgggcatagcaaggtcaaggaaagtttctttactattctttaaaaaaaaaaaaaaaaaaaaaaaaaaaaaaaaaaagacgggcctgggacatagctttaagctttctggaaactagtgtagtggaaataccatccctgctatcgaattttttacaaagcgtgttctctgttttgggtgccccctggccattctgagttctctctctccttgagcctccaggctgggtctcaggctgctgaagaaaggccagttggcagaggaggagaactggaaccagccaaggagacatttagtttctatttcttcttgccactggccttttgttcatcaactctgcttctccattgcgtggtcctttcagaataagattgcaggtcacctcctctgaagagggagcatgcactcattctgctaccctggcactgcatgtttccacagagtccacagtgtcccagttaatgtcactacatcatttcatatctatgtacatcctgtgactatatttcagttgtttaatgtctgtaacgatgtctcttcttcctacttagattccaagtacctcagatgagggacatgatcttcagcatccatctgtctatcttcaacaacttgtaatgagttgccttaatatcagctttctataaataagtgttgaatggatgaatgcttgtccatgtgtaggcctgcgtgtgactcaaagaacacatgtccatattcttttagaatgtgctgataacttccggataatctatttctctgatctttacattaccatagacattctagaagagagattgtttagtaaaaccctcattttaaagttgagaaagttgaagcccagaaaggttgtatgacttgtccaagatgtcatttccagctagtagcaaaactagggcccaaaccaaaatcctacctcctttcctaaagctccacccactgtaccatgcaccttacttcagcattggcaagtacagatatgtttattgtagctactgattgagttcgtaggggcagggaaatgtcaaagctagtgatttataaaagcttatatcagggtcaggcgtggaggtccaagagcagggtgcctgcctggtcagcttctggtgagggctcctttcctggcttgtagacagccgccttctcactgtgtgctcacatggcttttccttagtgcttgcaaagagaaagaaaaaagagatctccttttctcttcctcctcttataaggatcctttcagattaggattctacctatagacctcatttaactttaattacctcctaaaaagccctctctccaaatatagtcatgttgggggttacagcttcaacacgtgaattttttgcggacacaattcagtccatagcatagtgatagcgtaaaaatttaaaacaccttcaacatactataatatgatatgaaaatagttgttgtagtgtgtagtgggtcccccaccaggtgacttaagagtgtatgtctgctgcttgaaccctgaaggctgagcagtgagccaaggccatggtgcccagctgaggagtaggtgtccttgagaacccagacatcccggagagaatctgagaacctaccaaggaaaacagtcccatcgtgcacacgcacggatctctagagctatcctgctgccatccaggagtgccctgttataagccctaataaactcaactactcatcaagctggacttgtccaagttattctttggtctttcagcaccttcccagtttgggggtgggtactacagtcccaagtttttcctgtaacagctgagatctattggtgacaaagttacaggtactgctattaatactgtggtttgctgcctacattcatcatgggaggaaatgcttaatttcaggttgtggttagtgaaaataaataaatatatatgtatattttttacatccaagttcacaggcaccctgaatttctatacagggacatcgggctaagaatccttggtccacacaagtaatatgttctcgttgtgagcaagcaagtggcataacctcaggatggtgagaacagattttgaaatcagctgatatttcccattgccagttactcaggaacagtaagcatgttgaactgaaaatagacatcatctgctcttggcttgctttctgatatttttgattgtgtgtttgagtattggaatacgttttgtcttgcagacaccagtaacttaaatatagaacaaaataactcctggaccgctgagaacttctggcttgaccctgctgtgaaaggccagtcagagaaggaagaggatgatggccttcggaaatccctggatagattctatgaaatgtttggtcatccacagccaggctctgcaaactcactctctgcatctgtctgcaagtgcctgtctcagaaaatcactcaactaagaggccaggagagccaaaagtatgccctccgcagttttcaaatggcccgggtgatcttcaaccgggacggctgctccgtcttacagaggcattccagggacacccacttctacccactggaggaaggaagtacatctttggatgatgaaaagccaaacccaggactgtcaaaggatattactcatttcctcttgcagcagaatgtaatgaaagacctgtaactggtgccgggcagtgtgcagggtagtaatggaggtgctgtgccatgaccagcagtgttggtggccacccagatcccctagggtctctggccagctctgtgtgcccaatcccaattaagtgctttgaggttaaaggctggcacctgtgacctggtattggagccagtcagcccatatggagagccagcagggtctgggagttctccgtcctcttggccaaggccgctgactgactgggctacgagtcaaaagcccagctcccttgcctcaaggaaggacattctctgaggagtaatttatgctctagcactccctttcctctagatcggcctgaggctgggacattacatgaaatcacacccttgctgggcttaatccctttccctaccctcccatttatttactggtgtctctgggagcctttccttaataaacctcttatatctgaatccttgactcagagtctacttctgggagaattcaccctgagagaacatgcttctgtgagatgaggttttagaaggatacaaagctctacaccgaatcaggtataaggaattatatcaagttgtaaaactgagaccatgtcattgagaatacatgtcctaaaataatataaagattgaaatacagttgagaaaagtatatcacatcttgatcacacccttgcctcctctccaaagctagaaatccatgttttatcatactaactgggtgtggaaggaacatttggacaatctaaaataacagcgaaaattcacaattctttttaaaatctcttgtcttttatcagattgcaaacgtgaaaggtgagaaggtaacaaatgtgcaccacccaccacagtatatgtaagcacaattatgctacgctaggctgatgccacgtggccttgtcaagttgtgtttgaagagaataaataatcctttgcccaggtggggccctactttctcttgtcttctgcctgcctgcaccctctgtcaccttgtgaacgcttggcccctcacccctgccctgtccttgcctccaacaccctgagctccatttgcaaaggcttgcccagagcaggacttcttggccaccttgtccctgtcctccaggcatgagcccttcctcaccagggagctctttaaatagccagtgcaggtttgcactggcagatgctccgctctgcgggtcgtgtcctgaacccccatttgagactcagttggtagaattacatcacctggcaccgggatctcaagctgcaattggaagcctcatgctaatccctatcgcagcagtgctttcaacaaattgcattggcagaaagggttatattgcctttgggttggggggaacaacaaaagaagctggcagccctgagcaactagattttgagacacttgaggtgaaatttaattggcctaagattccaaaagctttccagaaagcggattatgcaaacgggtcagccttaaagtatacattgagagtgagtgtgccatctcaggaaggtatcccagggactcttggatggagagagaagccttttaaaggttaggaatgacacactcacactcaggcttccagtgctggggagattaggtgtaagaaacagtgttccagattgaagtgtagaggcacctcctggaaggagacccagatgatagaaataggaaatgaacaggtccttgagagacactggagaaaacaagacttcaggttttcctctgacaagcaatcgtctgcttctttctccatgggcgtttcctattcaactggcccccaaataatcgtgaagccagggggacttataattgaaaacctggcaattaaattttaaggtagctagctttattgtttttttaatgagaggcatattaatagatgtccttgaagaacgctatcatttttagtatgactcagtcactgcaatgtttgcggttcgtctccatggctacccacagaaggaaactggattattttatgttgtttttaaaaggacaaaaaatacgagttatttgaatcttcatgttggaaagcagcagcttctatttggcaatgagattttagtgtcaaacatttcataacctttatttaaatatgtgtgccaagagtgcccggtgagaggatagcccaaaagtagagagtttagaagtctcaaagtcagaatcacctcaggtttaaaaagagtgtggtgtgtgtttacttgcatctgaataagtgtttgtgacaggtcaatacaagatatttgattccctgcaaactcactgcttaatttgatctctgtgaggttaggatggcattttccatttatctctgtgaatctttaataaaggctaacagataaggatattgaggctttggcctttggcattattgtctaattctgccccacagataaattcaccaacattataccatctcatgcatgttatgactggcctgtgatatcatctgtggctcttttcaggtctttgtgagacatcagaactaagagcgcagaaacatcacaacccttaagaagagaactcctaccgatgtcttaaattcatgtgctattactcatttcattagtctatttctttgcataacctatgtaaaggcccatgtaacagatcttattaccagtaattagcacaaaacaatagagccatgcttttttattttaaaataatttatttgaaaaaatagagatgggatcttgctgtgttggccaggttgatcttgaactcttgacctcaagcaatcctcccacatcagcctcccaaagtgctaggattacatgtgtgagccactgtgcccggccagctttttaaactttttaaagcttttaacactttttattggataataatgattacacagaaacatacatatatcatacaagtgaacaccttgatgattttcacaaacaccctgcctgtgtagccagcatcctgatcaagcaacagatattacccaccagcccaggcccccttttaagtagagaaccgatgagaacagtttgctgtgaccagtgtttctcaaactgctagtagcacaaataattttagatactacatggaaaaacaatgtttattttaattggtaatctattcagtttaatatgttagaaaaatagaactaccacatctagtccatgctttcagatgtattgcataggacaagcctaatattagtatttgaaatttaaaactggactgaattaatttaaaaattaataatagtgcaggtaacatatatgtccaaatgtataaaagtggtatacctgaaaatgactaaggtttggaattcagtggtgtattaatctgttcttatgctgcttataaagacatacccaagactgggtaatttatgcaggaaagatgtttaattgactcacaattccacatggctgaggaggcctcacaatcatggccgaaaacaaatgagaagcaaagtcacgtcttacatggcggcaggcaagagagcttgtgtaggaactcccctttataaacccatcagatcttgcaagacttatttaacactatcatgagaacagcatgagaaagacccacccccatgattcaattacctcccacctggttcctcccatgacacatgggaattatgggagctacaattcaagatgagatttgagtggatacacagccaaaccacatcaagtgggataggtgatccatcatatcccattagtgtcccaccattgctcttctggaatactgcaagaaacttccatctggtcaatccatatgtacctttgcctctctttaccctgcagccacaatgcaaattcttttaaaaagctaaacatgcatgaatagccaaaaaatttaaaagaaggaactagccttctcaaatgtgaaaacatttttaattctatagtaattaaagcagcaaaaaaggcatagacaaaagaaaagagtacagtccataaatagatataaatgcctatggaaattgagtatatggcgaaggtggcattgcaaacccataagggaaaggtggaggttttagcaactgctcttattcactggctccccacactgggggagggagagtgaaaaaggctggattccccatcttatttctcatatcaaaatgaatattagatggattaaacactcaaaaaaataaaataacaaaaatgctagaataaaacacaggtgatatggatacctaaatagagatatctatatagagatatattggaacagggaagatttttctaagactgacacaaaacctaaaaaccataaaggacaaatttgataaaaataactgcctagccatacgcaagatcagaactaggaaaaatacttagaacacgtctaacagaggaactttttcaagaaacaagttgtacaaattattagaaaaacaaccgaatggaagcattgacaaaagacatgaacaggtggttaagaatatatatagaatatatatatatatgtaaaatgatcatgaaatcacgtgccactacactcaaacataaggaactacaactttgaacaccaatgagatattctttgtttttgcgttttgtttcttgattcttacattttgtagggctgtaaaaagttaaaaggaatctagtgctggccacgatgcggagagaaaaatgctccgattgactctcagtgggaatgtaaattgctatagcttttctcagtagaatatggcaacctctatcaaaattataaaaggattttttttttttttttgagatggagtttcgttctgtcgcccaggctggagtgcagtggcgcaatcttggcttactgcaacctccacctcccaggttcaagtgattttcctgcctcagcatcctgagtagctgggattacaggtgcccaccaccatgcccagctgattttttgtagttttagtagagatggggtttccccatgttggccaggctggtctcgaactcccgacctcaggtgatccacccgcctctgcctcccaaagtgctaggattacaggcgtgagccactgcacctggcctagaggatatctttgactcagtaattcatcctactgaattccaagctttagtcatttttgggtacaccacttttatacttttttacttacctgtatgtcacatgcactattataaatttaattttgttcatttaatccacttttaaattgtaaatatttatataggcttgtgctatgtaatctatgggaaagcacagattagatgtagtcatcccaggactgcgaccaaatctccactacagctagggccgcagcagtgaaccagacctggaagatctcctgctagtgaggggtgatggacaaaagcaagtccatttcaaatagtgagaagcaccctgggataataaagaatgacatggtagtgcctggggtggccactctggacagactggtgtgaggaagactctgaagaagtggcatttgagctttcagctgcaggagtcacagggccaggcagacaatggctggagcatccagtcagagggaacaatatgtgcaaagttagtgcaaactcagcctgggatgagctgaagtgtctggatagagggagtcccatgtggctggaggacaaccctcagaggcagaggggtagatgaatttcagaagcaggctatggttttttaggccaagggaaggaatttgaattttattctaagaacaatgtgaagtgatttaaggattttaagcaagagaataagataggtgttcaaatttatggaaatttatggctaacatttttaagtgctggtaaaggatgaattacctaaatatccaataaatggtgagatccctacctcacattatacacagagaaaaaacttcagatggattaaggatctaaatgtaaaaaataacactataagagttacagatgacaatatacctaagtgtttttacagtcctgcatgagaaaggccttcctaaaaccgatagcaatgcgaaataataaaagattgacagttttttgttttttgagacagagtttcactcttgctgcccaggctggagtgcagtggcaagatctcagctcactgcaacttctgcctcccgggttcaattgagtctcctgtctcagcctcctgagtagccgggattacaggcgcataccaccacatctggctaatttttgcattttttgttttttttttttaagtagagacagggtttcatcatattggtcaggctggttttgaactcctgacctcaggtgatccacccgcctcggcctcccaacgtgctggggttacacaagtgtgagccaccgtgcctgattaacagttttaactacataaaaattttaaacttatttttttaaatagatcagggtctcacggtgttgctcaggctggtcttgaactcctggactcaagtgattctcctgcctcagcctcccaagtgttgggattataggtctgagccactgcacctggccaaatttaaaatttagagtgaaagatatcataaatatgtgataaaagcattgtggttttgtgagaaaatatccttatttcttagaaatatatattgaaatatttaaactaaaatatcttaacatctgtaaattactttaaatatatttcaacagaaacaagataaagcagatatgacaaaatgttaacaagttatcacatccagatgatgagtatatgaaggttcactattctttccacttttctatgtatgaaattttcaaactatttatttagagacaaggtctcactctgttacccagactggagtgcagtggcgtgatcatagctcactacagccttgatctcaggtccaagcaatcctcctgcctcagcctcccaagtagctgggaccacaagtgcatgctaccacgccctgctaattttttttttttttttttttttttttttttttagagagagagagagagatagggtctgctttgttgccttggctggtcttgaactcctggtctcaaaagtaatcttcctgctttggtctcccacagtgctgggattataggcatatgcaatttgtctcaaaatacttgtttattccttttcccctctcaattctcattctgtcaggtcacttcacagtacatggctctctctcactttgctttctttctctagtggaaaatcaccctccctgtgtatctgagaactcagtcctcatgagcaaggtcacagtcagagaaagaacatattaaggccatctgaatgatggcccctttgggatagatgattctctctgcaaatatgcttgtggaccagaccaggcctgtttgcttgtttaacacccgaaggccttattctctcattgcctttttcttaaatccccgaaagctgtgcatcagagatagcagttttaccagcaaccgaaccaagagttctccaaatcctcccaagtgaatcctttccatctgctgtctcagtaggcagtgcactgacgaaggcacacagtttagcattcctgctctctttgttattttctcctcttccttcagcatttgcagctgaatgtcagatgccttaagcacatattatttcaccaggatgtaattaatgtgtattcaaactgtgggacttttctggttgcccttacaagctcctcctgggatcctgattaattattgttacattgtttctctagaaggcatgaggaccattaggatgtcaggtgcgcaattgtccgttgctctagttagaatcccggtatgcaaaaatgtctaaccctgccctgattttcacattattttcccactatctcatatcctcaagccctctcctttttcctctctctttttcaccatatatttaaaggtcttcattattttaagaaaattgtgcacacacacatattcatgcacttttaaaaacttgatttaatcatggtttacttctgttcagcttttcctctcccctttggtaccatcttctagacccacaaccaaaacacaagaagctgctggaatttggaagacctaggttgggaacccctggcttaaaccaacaagcatgtggtaaaaatcctgaggcaacttccagtttcaggagaagatgttatagacttactttttctggcttcttgttaaacacaaccaagtaccacggaaagaattcagcaatcataaaaggactctgaatggcagaaagaagatggatggactagggactcaggacttgaagaataacccaacagttggttttctggattttctttatcttccatatatcctggacaccagccagcctgaaaccacagacaggcataggagagagaaagagagggaagggaggggagggaagggggaagaagggggaagggggaagaagggggaagggggaagggggaagaagggggaagggggaagggggaagaagggggaagggggaagggggaggaagggggaagaagggggaagggggaaggggtcttctccctctggctaagggaccaggaaaggagaactcagtgaggagagccacacccagtggcagtggtggacccaatctgctcacagcactagcaccagcagaaatgagcttccaaccactcccctactccacagccacagacagcagcaggccagtatccctgcagcagtggcaacagaagaatccaaacgggccaacccacttcacatcccatctccaccagcagcagggggctcaatctgcccgtattagtggtaacagtgaaacccatgcaggccaggtcatctactgctccacaccaggtgacagcaggtaggctccttcacttgcacaagcagtgccagcaggtctggtgtctttcagccattcacgcagaggcagaaggcgatctagggcatcccccacacccacataatgacaccagtcaacctagagcagtgccttctgcctctgtaggcaccatatgtagcaacccagtaggagcttaagcagagccccaagagcaaagcagaccagaatagcactgcgaaggctcagaaaacacaactgtcgttaaaactatagcccacaaaagtaggcaaaactgacaccataaacctaaacagggcggttgcctgctaaaatagaagatttatacagaatcaagagtctcgtaacataatgtgcagaatgtccaggatacaattgaaaatgacttgtcataccaagaaccaggaaaatcacaactggagcgagaaaaggcaatcagctgacattgatagtgagatgaatcagatggtggaactatctgcaaagattttaaagcaactcccataatgtagtttcagtaagcagttataaaatcctttgaaacatgaaaaaatagaaaacctcagcaaataaatagaagttacaaaaagaaccaaatggaaatcacagaattgaaacatgcagcaacaaaatttaaaaactcaccaggtgggctcagcggtagcgtggagatgacaaaagataaagtcactgaccttgaggacaattccactgaatttattcaatttgatcaacagagagaagacggatgaggtagaggatgggagggaaggaaggaactacgagacaataacagaagacctaacattcagagccccagaaagactccagaaagatttgagggctaaacaagtattcaaaacataagggctgaaaacttcccaaatttggtgaaagacagaaacctacagattcacaaagctaagtgaacccgaaataggactgatcaaaagaaatcctcaccaaaacacattataattaaacttctgaagatgaaagaaaaaaatcttaagagcaaccaaggaggaatgcattatctataggcaaataccaatttgaatgagaacagatttttcatctgaaaccagggaggccagaatgaagtggctcaacatttttcaagtgctgaaagagaagaactgtcaaccatgaattctacatacagtgaaactgtattttaagaatgaaggagaaataagacaatgtgtggccagcagtcctacccttaaagaatgcctaaaggaagctctccaaacagaaaagaaatgccaaaagaagactggaagttcagaaaagaaagaacaacagaagggataaaaagaaaagaaaatataatagactattcttctccttatgagtttcttaactcatatttgatagctgaggcaaaaaatacaacatctattgtggtgcttaatagatgcagaggaaatacttgaggtaattatacttaaaaagagaggcaggttacaatatcatgatgtaataaaagatacatatttgtctctggctctagtttctcgcacagagctgctaaaaccattgtaaagtcctgagcaaaagacatgccaagtgcatcttttgttctaatatttggtcttttttttttttttttttttttttttttagatggagtctcactctgtcgcccaggctggagtgcagtgtaatatttggtctttaagcccaggtcctgacacagagctcctaataccatggaatttcctgggggatgggagggtcttttgttctattgaggcaactcttggtggattcctaggtggaggctggtgaccagaaagaccaagccataagtagaagcttgaaactttcagccccacctcccattctctgggaaggggaggggagctggaaactgggttaatagtagatcatgtagacatgatgaagcttccataaaaatccctgaactacagggttcagagagtttctgggctgctgaacacacggtggggcaaggaaaatgatgtacccagagcgggcagggaagctctgcagcccttgccacagacttcgccctatgattctcttatctggctgttgatctgtattctttatcatatactttaattttattttattttattttttgagatggagtatcgctctgtcacccaggctggagtgcagtggcatgatcccagctcactgcagcctccacctcctgggttcaagcgattgtcctgcctcagcctctcaagtacctgggattacaggcgtgcaccgccacgcctggctaatttttgtattttttttcatcttgttggccaggctagtctcaaactcctgacctcaagtgatcacgcatctcagcctcccaaagtgctgggatttacaggtgtgagctaccgcacccggtctatcatatactttataataaaccagtagatgtaagtgtttccttgagatctgtgagccatgctgccaaattatcaaacctagagagagggttttggaaatcccaattcatagctagaagtataggtgacaatgtggggcatgagattggtgctgaagttggggtcagtgttgtgtgactgagcccttaacctgcgggatctgatgctatctctaggtaaatagtgtcagaattgagttaaattttagcacactcggtgtctgctggagaattgcttggtataaggaaaaacattctcgtatctgatcacagaagtgtgtagtgtgttgagtatgagagtagagtaggagaaagcagtcagtttattttttcctcccatacacacaggtaaagggacctaaatggaagtagtgtttcagtatgtcactgagtgataaaatgtcaatataggatgctgcaataaaatatgtgtatatattttaacacctagagcaacaacttaaaaaaaactatacaaaatgatttatgcaaacacatataaataaaacaccaaggtgacaccctcaaaaatgttcaagtaactcctagaaaggcaaataaaaaacagattaaagaaatactaaaatggcaaacttaagccctgacatatcattaatcactttaaatgtatacagtccaaatacacaaattacagtatagatattgtcagaatactcccctcccacaaaaaacaaaaaaccatggccctactatatactgtctaaaagaaactaacttcaaatataacaacaggtaggtttaaattcagggaatggaaaaatatatattacactaacattaattaattgtaaaaaaatgggagtagtggctcactgtaaaaaagtgggagtggtgcctgtaatcccagtgctttggggggccaagatgagagaatcacttgaggtcaggagtttgagactagcctgggcaatatagccagaccccatctcttaaaaaatatattttttcaattagccgggcatagtggcacaagcctgttagtcctagctactagggaggctgaggtggaaggttgtttgggcccaggagttcaaggctacagtgagctataattgcaccaccgcaatccagcctgggtgacagtgagaccctatttctaaataaataaataaataaataaataaataaataaataaataaacaaaaaacaggggtgactatattgatatcatataaaatgaacttcaaagcaaagaaaacatattacacaattatgaaacaatcaatctgacaaagcaatcttaaatgtatatgcaccaaacaacagaactccacaattatagtttgggaaattcagcaccctgctctcagcaattaatataactacttgacataaaattagcaaatatatagaagaaatgaacaacaccatcaatcaacaagatttaactgatatttatagaatattctatccagcaatagtagaacatacattctgtacaagcctccaaaaagcattcggcaagatagacaataacctgaatgataaaacaaacctcaataaatttaaaataattgaaatcatacagagattttcttcaatcataatggaatcaaaatagaaatcaataacagaatataacaggaatgtcttcaaacacttggaaattaagtaacacacttctaaataaatgaacaaacttctaaacccatgagtcaaaggtgaagtctaaaagtgttgcaggggagacacacagaaatgaattaaaatgaaaaaatacatcattttaaagaagggtgtagcttaagtagtgctgagtgggaaatttataacactaaatgcttgcgttagaaattaggaaagcaaattcaaatttaagttcttagttcaagaaattagaaaaagaagaacaaaatagatccaaagtaagcagaaagtaggaaataataaaaataagagcagaaatcaacaaatgtgagaaaaagaaaacaatacaggaaatcagacagggcaaagtggctcacacctgtaatctcagcactttaagaggcggaggagggagaattacttgacctcaggaggtcaaggctacagtgagccacatgtgcactactatactccagcctgggtgacagtgtgagactctgtctcaaaaaaaaataagaagaagaataaaaaagaaaataaaagaaaatcagtgaaaccaaaagctagttcttcaaaaatagagaaactgtaaaaatcaccgatatcactattctgtatgatagtggatacataaacttacacatgtgtgacaaaattgcatagaactaaatatgcacaagtgagtacaagtcaaaatggagaaattggcataagagctatcagtatcaatggcaatatccttgttgtagatattatactacagttttgcataatgatatcattgaaggaaactgggtaaaggataaacaagatctctgtcagtttttacaactgcacatttgtctacatttatctcaaaataaaaaggttaattttaaaatgttgagggtcaacaagttgggccagtttcatctgagcagttggggtcactcatgcagtttcagtcatctgctatatcacctggtgttgaatgctccaagatggccttgtttgcatttctggtagttagggctggtgttgactggggcattacatggaggtagagttcctagagggcatatcccaccacacaagcacttttcaagcctctgcttacatcacatgccccattggccaaagcaagtcacatggccatactcagagtcattatgggaaagcactacacacgggcatgtaacacaaggaggcatgattcattggcagccatttctaaaatgatctcccacaaagggtgagaatatttttctttctttttcttttttttttttttttttgaggcagagttttggtcttgttgcccgggctggagtgcaatggcgtgatctcggctcaccacaacctctgcctcccaggttcaagcgattctcctacctaagcccccccgagtagctgggattacagccttgcactgccactcccagctaattttgtatttttagtagagatgggttttctccatgttgatcaggctggtctcgaacttctgacctcaggtaatttgcccacctcggcctcccaaagtgctgggattacaggtgtgagccactgtgccttgctgagaatatttttcaataatatttctttatgaacatctatcacttggatctgctacatatttttctttttctttctttctttttttttttttttttttgagaccaagtcttgctctgtcacccaggctggagtgcagtggcacaatctcagctcactgcaatctccacctcccaggttcaagcaattctccctaccttagcctcctgagtagctgggattacaggtgcccgccatcacacccagctaatttttgtattttttagtagagatggggtttctccatgttggccaggctggtcttgaactcccaacctcaggtgatctgcccgccttggcctcccaaagtgctgggattacaggcatgagccaccatgcccggcctgctcacatatttttgaacacctttccacatttagatatttcccagccttgggaaacacctttcccagcttcccctgtcaatgtgctacacacacaggacttggctctgccaaccagacacaagtgtgaggctgagagatgacctgtgaagaaacaggcagggcatttgggcatccattgtgttgaagctgaggcaattggaaatagcatatttctggaggggtggcaacaacagcttctcgactgtggcagaggtggtgtgattcagggcttggtgagggtgagggtggtttcctgaccaggatgaaggaagcctcgtacagaagtcagaggcagccacatttcccttgccattctagttctgtggtgtgagctggaaagttgttgctataatcccagcctatagcttattcctgtagccctttcaacattttgatgcatttctagcaaatcccagttccttaaattagctagagtggtgtgggaaaccaaaatatgccaccccaaaatatacttctttggcatatttcaagttggttatttggaaaagctgcagatgggaatagctctgaaaaagctaccctcctgtaaaagaaatttacatctatctacattagtaaagcaaacaggagatgcaggcacaggctttctctgaggttctcttatccatatctaggaaagagtaactcacaggaaaatgagactggtggtctgacacttttatctttgtttatttatttatgttagttagggtctcactttctcacccaggctagagtgcaggggcatgaccatggctccctgcaaccttgaactcctaggctcaagccatccttccaactcagcctcctgagtagcttggattataggcacatggcaccaaacccagctaattttcttttaattgttttagagatggagtcttgctatgttgcccaggctagtcttgaacctctggcctcaagcaatcctcccacctcagcctcccaaagcagtgggattacaggtgtgagccaccatgcccagcctgatacttttaaaggtctgacagagaaacctttaccacaggctgccatctattttgttctcaggactactgtctgagagatttcatctgcatagtaagacaggctttgcttgacttgcctttcttcccttcaccctcccataacctgttaccacctatccccaggagccccaagctcctatttctttccatatggtataagaacttcagtcatctggctcttctttgagtctcatattttgtatggcttctgtgcatttgcatgtaaataaatttatatgccttttctcctattaatctgtctattgtccatttgttttacagacccaaattattgaaccttcagaagcagggggaagaaaaattcccttcacccctacagtggattctgttgtctgcaggtggtaacgctggtggataaaaatctctttttgaattatcagctatatgtcggtcttgcctattcaaaaataaacaaaaatgtaatttaaaaatgaataatgtaaaagggtgtgatctaaatcttccccaatccctgtttaatgtctgtctcccaagcagtccctctccctcctgaccttgacctctcatttttccctgaagcacaatcttgagccctgcttgatccgtatgaaaccgctatttttgttggtcaaaatagccaagaactagcaattccatagtcttcaacttcacacttgccatttgtattagtctgttctcaagctgctaataaagacatacttgagactgggtaatttataaagaaaagaggtttaattgactcacagttccacatggctgatgaggcctcacactcatggcagaaagaaaatgaggagcgaagtcacatcttacgtggtgacaggtaagagagcttgtgcaggggaactcccatttataaaaccatcagctctcatgagacttattcactaccgtgagaacagtaaggaggaaactgaccccatgattcaattatctctacctggtccctctcactgcacgtgggaattatgggagctacaattcaagacgagatttgggtggggacacagccaaaccatatcatcattctttggaatttatcttccctcaaaactccagctattattcatctgccaattttcaagtctttaccaagtttctatcctatataactctaatttcccatggaacattctactcatatgtgtccttgtcgctttaaagaaaatgtatagaaaatcaaatgtatcctctttcccacaagttaatattctcatttgatgcctctaatctatccatggcactaacatttgctgtcactcaggcttgacgaagtgtggattcattatgacttttacttctaaatgtctcactgtatacagcaagaagtggtggttaagagctgagacacaggaggcggcctgcctgggtgtgaattttgacttggccatttattagtgtatgtccttgggcatgttatttaacctgactgtgcctcagcttcctcaactgtaaaacaggaataacaatagtgcttagttcaggaggcacaaatgagttcagatttttacagacagttcctgacttatagctcaacttaaggttttttatctttacaatggcatgaaatcattcagtacactcctcaacttttgatgggattacaatttcataaacctatcataaattgaaaatattctaaatcaagcaacttaagatattttcaatttatgatggatttatcgggatataacctcatcttaaatcaaggaacatctatatagtattcagaacagcacctagtatatagtggtttttttaaatttgtttgtttgtgatgaagttttgctcttattgcccaggctggagtgcaatggcttgatctcagctcaccgcaacctccgcctcccaggttcaagcgattctcctgcctcagcctcccaagtagctgggattacaggcatgtgccaccacgcccggctaattttgtattttaagtagtaacggggtttctccatgttgatcaggctagtttcgaactcctgacctcagatgatctgcccgcctcagcctcccaaagtgctgggattataggtgtgagccaccgcacccagccagaaagcactttgggaggccaaggtgcacagatcgcttgagcccaggatcttgagaccagcctgggcaacatggcaaaaccctgactctacaaaaaaatacaaaaaattagctgggctgagaggcgtgtgcctgtagtccaagctacttgggaggctgaggtacgagaatcacctgaacctgggagatagaggctgctgtgagccatgattgtgccattgcactccagcctggggggcagagtgagaccctgtctcaaacacacacacacacacacacacacacacacacacacacacaacctcttacacctgccttgtctttttcttcccaacaccatcacctgcatcattttcatctccttaaggacctcctgaaggttttccctgctgccagttctccccttttcagcctcttccattcactgttgctaccacgttgattttcccaaatcaccgagggtatcctatctcatcccccacagaaagctccttaatgccaacaaaaggaagccccaccacaggtccacactgatcgaacccagatgtcctgccctctccacatttctgagactggacccgccaaaacattcctttccttctctagctcccacggctctacccagctactcatttgcactttaactgctacacagcaggactgtcctttaactgttaacatgtgtacatctgccttccttgaacaggcagaaagttcttgaaggctggagagcttataccacccataccaggcacagagtagtgctgggtaaatagcaaccaagacgtaatttttttctgtattcacacttccttttcagcttcctggtggagtcagcttgacaacatctttctctttcctacaactgaaactataattttaaaaccaagagcaaggggccagtgtcggagatgggttcgtaccttctgaaagacatcatggtggaaggaagagtccagttgcaggcgtgagaggctaaagcacttccattaacgagcagggtgtccagtgaggctcatctacctcctctgaacttcatttccgtgtctgcaaatgaggacattaacaaagctcccggtccccctcaggcttaaacgttctgtgacaaatctctaagagggtggattcgggaaactaattttcaaattaattgagcagtgtggagttattgcacggagaattaaactgctgtccataacagttcatttcctgagtttgtttatcaaccactgtttaataggcactatttattctgcagtatcatgggtggagtgctatggagacacagaagttgtatctcaccagatccatagcttcaaaaagtttattatgtaattagagtttattatataataaaagctcaccaagctcatgatctggcaaatggcattgtttgtttacctaagccttcttttgtaaaataagaaagttttacttgaatcattatgtataatacccctgggagctgtgtgttctatgtgtcatttctatgttattttatttgaaatacacacacacacagtatgtttcaatgtaaacatatgcatttaaaatgtatatttttaaatatctccatcaacaggctgatttttaaaacttttcaatataccaaataatgtagattttcaaatatacacaaaaatagagagaattgtattatgaactccatgtactgatcacctaccttcaacagccatcagctttctgccattctttttcagcagatcccaccaccacctccctctgtgtgtgtgtgtgtgtgtgtgtgtgtgtgtgtgtgtgcgccaagacactgctcctcaagctaaggactcttttgttcaatttccgatctgccatggaccaataccagcacacagctcacacccaagccacacataacacactatgcaggtttgacaacacccaaactaagttctattctcattagagtccaccactcactacttggatgccatggcaatgtcaaagtactatagccatttctaaatatttgttgtcaatttctgcacttattacagaccaagagcacacaatttgcaaactggccccaatcctcagactttgagtagtactgcatgcgctagagtattttaaaataaaatctacggcattattttattgcagctgcaaattcagcatgtatctccaatggataagtatgtttttgttgttgttgctctgtcacccaggccggagtgcagtggtgtgatcttggctcactgtagcctctgcctcccaggctcaagtgatcctcccacctcagcctcccgagtagctgagactataggtatgcaccaccacacccggctaatttttttgtatttttggtggagaaagcatttcaccatgttgcccaggctggtctggaacccatgagctcaagcaatctgcccgcctcggcctcccaaagtgctgggattataggcatcagccatggtgcccagccttgtactttttaaaaacaaccagaatataatactcccaagaaaataatcaataattcctgaacatcatctactatttagtccatattcaattttccccagttgtctcaaaaatgccttcttacagttggtttgtttgaatcaggattcaaacaaggattttgcatttggttgacataccttttaagccaaactatagtagtctctctctcctttaaaagctgcttttaagccactctccaaatagattggtttaccattaactataaaaggtttcctgacccatattgcttcaagcagtttttccatgcatttgctttgtgccacagtgtgactgtggcttaaaaaccaattacttcttccccctaaaaatgcccattatctgtgcctattagaggcacatttacattccccagactttttgccagggcaccagaactatttagattaccatgtattaaaaaagtgccagtcactctcactgtcttatcacctctggttctctttgtctccaatgggcccattcattgagcagatatctgtgcatgttgttaaatgaaccatggatgttcttgcccttgatgtaccaaagcagtgtttaccaggtacattcatttcttcggggacctatgcagacatatagtgggcatagtgggaaagtgaggaactgaatatgacttgagatactcaagtgatttgatttggaccagacccatctgtggctgtcacacaatgacatctttttccatactcgtcaccactaaggctacaggagctcaggtagctttgggtcttcactggccaacattttaggaagaatcatagaaaaatcatagaacagaaaaataatctcagcaactatgcagtcaagcccccgaagggttggagacaaaagcccccacagctatctagatgcctcctggacaagggcccaggtctctgacctccagaggaagctctgtgtatatgggatatcaatttctatgccactcagggttctcagttgcacataacagaagaggattctggctgactttaatagaaggatagtaggtggctaatagaattgacaggatgggtaaccaggttttgaaatcaggcaggctctgagggaggccaggcagcaaggacacagcctaggccatgcttcaggggcagtctgggtaggatgtccctaactgtggctctgctgccactctggctgctggacatcaacacaactgaacacaggagccagatgctgcggctgcttgaaattctaaactatccctgagtctaaattaaaagtcctggtgtaggcaaaagaaagagagatcagacggctgctgtgtctatgtagaaagggaagacataagaaactccattttgacctgtaccctgaacaattgctttgccctgagatgctgttaatctgtaactttgccccaaccttgagctcagagaaacatgtgttatatggaatcaaggtttgagggatctagggctgtacaggatgtgtcttgttaacaaaatgtttacaggcagtatgcttggtaaaagtcatccccattctccagtctcgataagccagaggcacaatgcactgcggaaagccgcagggacctctgccctggaaagccgggtattgtccaaggtttctccccatatgatggtctgaaatatggccttgtgggatgggaaagacctgactgtcccccagcctgacacccgtgaagggtctgtgctgaggaggattagtaaaagaggaaagcctcttgcagttgagaaagaggaaggccaccgtctcctgcctgcccctgggaaccgaatatctcggtataaaacccgattgtacatttattctattctgagataggagaaaaaccgccctgtggcgggaggcgagacatgttggcagcaacgctgctctgttattctttactccactgagatatttgggtggagaaaagcataaatctggcttacatgcacatccaggcatagtacctccacttgaacttatttgtgatacagattcctttgctcacatgttttcttgctgatcttctcactattatcaccctgctctcctaccgcattcctcttgctgagatagtgaaaatagtaatcaataaaaactgagggaactcagagaccggtgctggtgctggtcctctgtatgctgagcgccggtcccctgggcccactgttctttctctatactttgtgtcttatttcttttctcagtctctcgtcccacttgacaagatatacccacaggtgtggaggggcaggccaccccttcatcctgggtgggagcatttgatttgctgagactagataatatgactgtcctctagtggccagggaccagcaaaagggcatctggctccgctcctttctatagtgggaagtagatcctgcctgccttcatgaccacatcacagagggaagggcattaggatgctaagtaacccctacaaccgcaaatgactatttcacctccccatttggacttctgtgagcatatagacatcaccaacagttttgttttcgttttgcttttcttgagacagggtctcactctgtcacccaggctggagtgcagtggcattatcatgtctcactgcagcctctgacctcctgggaacaagcaatcctctagcctcagcctcctgagtacctgggactgcacgcatgagccattatgcttggctagttttttattttttaatttcttgtagagacgagctcttgcaatgttgcccagcctggtcttgaactcctgggctcaagcaattctcctaccttggcctcccaaaattctaggattagaggcatgagccactgtgcctggcagttactttatttctacaaaacatggaggcatttcctatcactcctcaaatgagttacaccccccacaaaaagcactgttctaagtgctgagtttgcaaaggctttaacctcactgaaggggaaagaatttcttcttctgtctcgctagttcactgattgcctccttctggcccaatgtctgggggaaaaccaaagatcaatgtgtccacttgacttttgctcagatgcttagtgtgcagttagcttccaggagcatggaaacttcttctccaagggttccattagtgattagacgtgcactttaaagtatgtcatgctgccacgtatcagactgggacagagatgaactggaacatgagagatgtgttgaggtgacagccaggattctgccattgttctttcagtgtatttctgatgcctctcaaattccataaggggaggtgttgatgtctgtggttaagtaacatgaggccagagctgacgctgtggcagctgctcccaaaggcacagagtttcttcgttgccaggaaaagatgcccttgaattttctgggctgaggtaagaaagtttggcagatcctgccttctctgctttctgtttgccttaatggatatcaagatagaaaataaggagccagaaggaccttcagagaatctattcacggcctgtgtgtcttaggctccccccagaaatagactctccggcacaaattcaagtgcaagtagtttatttgagtgggaaagcaaggaactgagacaggagagggaaagaagcagtaaaaggtacattatcaagcaagttaccactgtgggcatctggaacttaagcctactggagccagtgcagattgtaagcttcaaagttatcctgcaaaaggagtaaggcagctagggtatttaaacaccagtccccatccatctttgattgaaggctgaaactgggagggcactaatttccaagtgcttccagcttgctgtgtgaatgggcaaagcaagctctggccaccagacaaagccctcgggcaaagaggcagatgctggcagttgaaagtcaggtgctgtggcacaaaatgctaaggcccgagggggcatgggcagggcacccaaaacatctgctgtactgtgtccactctcatcctccagacttgtggacaaacttcctgttcatcattcattcaaagcccagcataaatcttcccagaatcatccgggcgtggtagctcacgcctgtaatcccagcactttgggaggccaaggcaggcgaatcacctgaggtcgggagttcaagacgagcctgaccaacatggagaaaccctgtctctactaaaaacacaaaattagcctggcttggtggtgcatgcctgtaatcccagctactcaggaggctgaggcaggagaatcacttgaacccgggaggcagaggttgtggtgagccaatatcgcaccatcgcactccagcctgggcaacaaactccgtctcaaaaaaaaaaaaaaaattcttcccagaatcaatcaggaggtgcacatcctccaccagattcctaattggtacaggtggtttatttcactatttactgctcaataactctctacccgtgttgcagagtcactcaggtttaatcttctttcaaccctgccagaaaactcatcagcagcccacagaccctgaccacagccctggcataactgaataaatgctgactaattgactaactctcatttccttctattcagcaaatgtcctggatatttggaaatgccacagttcacagccaatgcactttcagcaggtcctgaaaaatgatttggagaggtttacaatttgctaaatgtgttgagtctgggattggtagagaaccatgaccttgggagaatagaatgtttctcttctctgggacataggtcgggttccttcgggactatggatagaatttgcttaaactgtgggtcagctagttgtgagttggcaacttggggatgtctgtgagaggctgggattgtggggaaagcagaaacacttgcttagttttgtctggtgtgcgaatatcctactaagatttactgaaggaatagaaagaccatctgaggtttcccatgtgatcttatattaatgaagggatatctttgagtctcatgtcttgctggttttcatcattcatttttttttctttttcaccctgagtatcagcctttaatagaaattgtgatatctcaggatcaggtggttacatcaaaaagaaccttaataggtcacctgggcagtctctcagtctccaggctataccgtgcttaaactattcctaacaggacgctgcttatccaccgtctggaaatttttccaaaagtggggtcaggctgggtgcagtggctcactccagaccgaccagcctggccaacatgatgaaaccccatctctactaaaaatacaaaaattagcccggctggtctggctactcgggaggctgaggcaggagaatcgcttgaacccaggaggcagaggttgcagtgagccgagatctcgccattgcactccagcctgggagcagagcgagactccatctcaaaacaaaacaaaacaagacaaaacaaaagggggtcaaagaaatgccatctgcattatcagcacatatagttttctgcccagatcataaagtttataacatctgccttatttatatcaaatatgtcatctatgtcaatgtttacagctatatcatttatctataggctgtatcttataacatcatttgcctctatatttacacatactctgcctacatctgtgttcacagctttatcatctacagctacattttcatctttactatctacatcacctatacctatgcttatattacatcattatctacatcaacatttttatctacaccttctgtaccagtggttctcaactggagaaactttgcccagggacatttggcaacttccagaaagacttcttattgttacaactcagggttgggggaagaaatgccctcagcatctaggccagagatgctgctaaatcccagggatactgctaaatcctgcaatgcacaggacagtccttgacaacaaagatatatccggcctaaaatatcaatagtgttgaggttaagaaactctaatctacatcacctacctcatctgcatccatatttacagctatgccatgcacatctgcatctatatttgcatctactctatctaaatctgtgtatatatctacaccatctactctacattggcatctacgtagtcgacagctacctctacagcatctacaatatctatgtcaactacatcgacgtcatccactccatgtacatcatccacatctacgggatctaaactttgcatgcacatctatatctaattatatagatgatataacaatcaacacatgcttgttatatcaaaatgagtggtccttttagactagaaagcaaatctaattttaatttttccctccactggccacacacataaaacgtgagtggaacagatccttacctggcaggggagataccatgatcatgaaggtggttttcccagggtgaggttccactgcactccagaggtgctgatcctgtgatttccccaaatgtgggaaacgcaactgcataatttgtggcagtgggaactatgttctcactatcccctgtttttgttgttgttgttgttgtttgttttttgttttttttgagacggagtctcactctatcacccaggctggagttcagtggtgcaacctcggctcactgcaagctccgcctcccgggttcacgccattctcctgcctcagcctcccgagtagctgagactacaggcagccgccaccatgcccgactaattattttgttttttttttttttttagtagagaaggggtttcaccgtgttagccaggatggtctcgatctcctgacctcgtgatccacccacctcggcctcccaaagtgctgggattgcaggcatgagccaccgcgcccagctctcccacttttttaaaaaagggagtagaacagaggccaatcattgtctattatactccttaaagtataagaggcatgagctgttttccaactttgtccttgctagcaaacacctcaatattgttggtttatgggctttgataagcaacgaaggaggcttccattttgatttgggtcgaagtgagaagttaaacacgtgcctgataaatttcattcctgctctgtctttgcttgccagcatcccgggatgagagggcatcagatgcagagacacttgtgtcacaattcatcacaatggtgataaagaatagtttcttctcagaagagcgatcactgcacttagagaacctgatatggttgatcacatcttgttccaccggaactggtctgggctggaaaacacgcagttgacacatgggaagccgcagatgctgctatttcaccctgggctctttgggcctcagaatagtaaaagacatctgattccatgaccaaaacagcagctcgggttgccacgttcagttaagcttccttaggtacatgagctgatttgtcagccaagataaaagtcaagtgatgtttctagatgaaattgagaacacgggagatagacaaacaagagcaaatccctgtggcttctttagcctgtgacatttactcaataacttcgcttcctggtagaaacccatgcctcctggagaccattatttttcctccaggaacaagattggcctgaggcaaagtttcaaaacagactcttactcacctttttatattctcattttttgtagtgttttcaaattctcaataaatattaatactaatacctagaacttggaaatgagaaatcggaagttatttactcattattctggatttaacattttttgtttgtttgtttgttttgagactgagtctggctctctagcccagcctggagtgcggtggcaccatctcggctcactgcaacctccgcctcctgggttcaagcaagtcttgtgcctcagcctcccgagtagctaggattacaggtgccccctaccacgctcggctaatttttgtatttttagtagagacagggtttcaccatgttgaccagtctggtctgaaagtcctggcctccagtgatccacctgcctcgccctcccaaagtgctgagattacaggcatgagccaccgtgcctgcctagatttaacttattttaataaataagaaatattctgtctagtagtatttacaaagaactataacctattgcaaatatccaaaccttgtcaaaggctagcaaacattactaagtagtttttgaatcaaatctagcccagcaaagttaacagcattacatagaaatcgcaattcaaaatcatcaatttatagatttttttgcttccaaaagttgttatttcttggaacatcactcttagggtctgtgtaaagtatgctataaaaagtgcaaagttcttttttcaattttatttttaaaactttctctttgtttttttgagatggagtctctttctgtcacccaggctggagtgcagtggcacaatctcggctcactgcaacctctgcctcctgtgttcaagtgattctcctgcctcagcctcctgagtagctgggactacaggcacccgccatcatgcccagctaatttttatacttttagtagagacagcgtttcaccatgttggccaggctggtctcaaactcctggcctcaggtgatccacctgcctcagcctcccaaagtgcttggaatacaggtgtgagccactgcacctgacctaaaaagtgtaaagttcttaatatttattttatttgcaaaaacgcctcccagttagcagcagacagggccaggaacacatgcttgtaacatggtatcagttataagcaaggcagactgatcagcccatggcaccttctctacatgtgctccctgccttgctctcagaaacgttgacctcaaccttcaactgctatgtcagttgatcttgccttcagtggatccctcgatgaatctctcaaaccactggggcctctgctgattgttaagctttaattctcgcagaattgcaatacattttttccattttctcaactgatttgtctcagaatttgggatgtagaagagtatataaattgtccagaaatgctgggaaggaattttctcatggccacactactcatcacgtcatcagtggggactccctctttcctggcctgttgctctgaccacccaaacttcccttctacctggtccgtctcggcttacccttttcccttaatcatttaagcttcaaggatacacactccctaccagaaaaactccaggattctccaggctggactttagacttgaagagaacagcaatccaactgaactatttcaccctgaagtatgaataactaatatgccttctgtaggaattagaagcataatcaaaataacaaatatttctgcaagtatgggaaaaatagtccaacaaagcattcccttcagcgatagcagaagcaaaggttttcaagggccacctagatgataaactgtgggcactgggctggatgtgagaccgtaaagagtggtggagacagagtgtggtcaaacttcaactaaaggcgtttgaattcaaatgtttaagacaaccaaccagtaagagccaaacataactcactttagtgacagccaagcttggccctcaggctactagttttttatctctctgttgaatactccagtgagatatgggcctaatggaagccaattcttgttgctaagccaacttcagatcccagagagttagaatcacagattaaaacgttctaaccaccataattaaaaaaaaaaaaaccaaataggtaaaatgtcatcatttttaatgttagacttttaataaatttagtaattagatgagaaaaatcatgtcccatatgtaggctacgtatttgtaaacaaggtaaggtgaggaattcagaaaattataattacatgctcctcccatttaactagtgcacatacgttagaaatgttcccttatattacataattggttgatcacccttatccgtatacaaattcaaatgaaatcctaatggtaaaatgagagcatagctcactgcactacagccttgaactcctgggctaagccatcattctgcctcagcctcccgagtagctgggactatacataggcatgcaccactgtgcctggctagtcactggctttttatccattaaatatatcctgaatgcagtgcaatactcaccacagtagcttgatgtgattcttcccttttaactctgttggaaacattttcacagtcgaagtttgtcttatgtgtacaaatgtgcacaatgttgtctccctgtggcctgctgttctagtaaccagatttttattcccttaactgtgacatttgactgcaatgctgcataaaaggcaccatttggggggagaaaagattttaatcaacatatacctcagctgctctatctcttcttaacatgatggtgggtttcctccaatacaaagggtctcagttcccctatagaatttttcttagcatgtctgtgattacttgaagtgttattcgttaatgacttccaaatctttctaccaggttaaggtgatctttgcaatgccaaagatattgaactctacttgggccctaaaatctcattgtccttcttccttgatgtagacattgaagattttaatatctcatttccatctccatcacttgagattgttgagatggttcttgcccacctgggacagaacatcagccaggcagaggaaggaatgtgagcattaaaagccaacaaggctgtttcaaatcagagttctgtcataaatagctgtgtcaccttgagcaaattgcttttttttttctttttttgagatggggtttcactcttgttgcctagactgaagtgcaatggcacaatctcggctcactgcaacctctgcctcccaggttcaagtgattctcctgcttcagcctcccgagtagctgggattacagctgcctgccaccacactcagctattttttttttttttttttgtatttttagtagagacagggtttcaccatgttgaccaggctggtctcgaactcctgacctcaggttatccacctgcctcgactcacaaagtgctgggattacaggcgtgagccaccatgcccaacctgcttaacgtctcttaactgtgctgtttttatcttcaggacgagcataatgaactctgcctcatgggagtattttaaggattcacagaaatgatgtttaagatgcaggaagcacatcataggaatggaggaggcttatagaagccctcaatacatgggaacggctcttatccttccccatccattgcccatcccttctacatccccacctctttttccttattcatccaattctgtgtcggtttccttgggctgcagtaacaaactatcacaaacttggtggcttaaaacttattctctcacggttctgaagctagaggtctgaaatcaagaatcgaggtttcaccaggactgtgttctctctgaatcctacagggaagcatccttccttgcttcttcccagtttcggatggttgacagcaatcttctgcattccttggcttgtattaggttggcgcaaaaccaattgcggttgttgccattaaaagtaatggcaattggttttgcaccaacctaattgctacatatctccatgtgtccctcttcacatgacattctttcctgggtttcctctgcttctctgtatccaaatctccctcttcatataaaaacaccagttgttgaatttaaggtcttgattcagtataacctcaccttaactagtgacctctgcaaggactctatttctaacataagatcacattctaagggtccagattaacttgaattttggggggattctattccacccagtatcttcactttgggatgttcaagtcttgcccaccaggaaggcccagatcagattccatcacctaggtgtattgtccctaactgacagctgctatgactatcccatggtataaaccatgggaacacatctgtcctatgcccagcggtgcactggtaaatgtttagcaaacagctccactgagtaggtgctggcagggaaaccctgatatatatgcagctggtttatgtgctgtattctcccaccatggccaagttcaagctaccaacatgatgttaatcaactcttgaagtttctgaaaatttagcaatcagctctctcaagctagtatgaggcaactcaaagatgagtggcacacttcctgtaactactgttttgtctttaatgttactcatcatcctatgaaataataagcttctctgacatatatttacttacgagccagttaaaaatcatctccagtggaagccttgagggcctctgccaacctttgaaatatctagtggcccaattttgtattttgtattttcctccaaagaagcactcataatcctgtattataataatgtatttgcttctttgaattcttgacaggctcactgagggcagttactgtgtgtcctagttgtccctgaatcccaacaacttgcacaatgtcagactctctgcaggagctcacttgtcaaattgaattgatcgaaaggatcagggtccggtcaatgtcttgttttgtcttccacagtgtcatgcacatagtaggcactcagtacacctttccccaaatcacactatatcataattttggccccaagagtagaccacccaccctcatgctgtttgaatgccctccctaatagtggttcccatacctggttgtgcatcattcattcatgcacatgcaatatgcatattgttgaatgaatgaacgaagcacagccagatatgggaaccgtcatagcagccactatgagccaggtactgttctaggtgcttggaatagaggacacaatgaaacaggcgaaaactcctgccctcatggagcttagactctagtgggagagataggaaacaaacaattaaaacatacatggtgttttactggtgtggtaagtgcttaggagaacaatggaacagaagaaaggatagagcatgctggcaaagggagagggagaaaatctcagaaggccacaccgaaaggtggcattgaaggaaatccctgaaggagggagggaaggaggatgagaatctctggccctggatgagggcacagtgagtgcaaaggacctgagacagaagaatacttggcatgtctaaggaacagcacagaggcaagtgttcctggagaagagtacatgagggggaaagcaggagacatgagagacatactgagagctgaattgtaaagggctggtagccactgtaaagactctgtctcatgaatgacacgagagctgttgagggcattttcagaagaggaatgacatgacttgactaaagacattagtgtactctgtttagatattatatggaggaaggattgtaaagagacaaggacagaagtaggaagaccactgaggaggccgttcattgtgtaggtgagggttgatgatgacctgtggcagtggtggtagtcaatggaggtggaaatcagtggccagattctggatatattttaaaggttgagtccacaggattcttaaaaagattagctattggatatgagaggacagaggagttaagaatgactccaaggtttgtggctgagcacctgaaattatggagacaccatttactgggatgaggaagtctaagggaacagcacattcacatgggaatatcaagagtttagtgtcggacaggtgaggtctgaaatggatatgcaacatctaagtatagatgtcaggtaggcaattgcatatttgagccagaattcagaagagcaattggaattggagttataaatcttgaagatgtcacctaattaatgatgatacttaaaatcaagagtctggatgagagcaccaagaaggaagaatggatagagaagagaagaagtccagtgctgaggtttgggacactctgatgtttagagatttggggaatgaggagacaacaaaagaacctgaaatgaagagctcagagaaacaggtgagtgcagtgtctcaggaactaagtaaaaaaaggatttcaaggtggagagaatgatcagctgtgtcataggctactgatagggcaggcaaggtgactacagggcaatattatgagtaaatgtatgccaacaaataagaaaacagatgaaatggacaaattcaaagaaaaacaaaaactacttaactggactcaagaagaaatagaaaacctaggctgcatatggtggctcatgcctgtaatatcagtactttgggaggctgaggtgggcagatcacttgggctgaaaggttcgagaccagcctggacaagaagcaaaaccctgtctctacaaaaaaaaaaaaagcaaaaattagctgggcatggtgatgcatgcttgtggtcccagctccttgggatgttgaggtgacagaatcacttgaggccaggaggttgagactgcagtaagcagtgatcataccactgtaatccaatctgggtgacaggatgagactgtctcaaaacaaaaaaaaaaaaaaaaagggaagaagaagaaatagaaaatccaaacagatctataccaagtaaagaatagtcaattagtaattttaaaactttccccaaaggaaagcctagtttcagatagcttcatgggtgaattctatcaaacatttaaagtaaaattaagatgaatcatttacaaactctttcaaaaaaaaaaaaagaagaaggaaacacagtgaagaagaagaggaacacttcccaaccctgtcaggccagtgataacctaataccaaaaccagacaatgccaatgtaccttatgatacacatgcaaaaagcttaagcaaagtactagcaaactgaagccaacaatatataaaaggcattagatgtcattaacaagtgggatttatcccacatatgcagggctcattcattatttaaaaatcttccagcatgatataccttattaagagaataaaaggaaaaaaactaccatgtggtcatctcatagatactgaaaaagcatttgacaaaatctaacagtcttttgtgatttaaaaaaaaaagtcaacaaactagaaatctaaggaaattttcttgacctgacaaaggactactataaaaagcccatggctaacaccatacttaatagtaaaatactgaaagctttccccctgagatcaggaacaaaacaaaaataagacaaaaatatccactcttgccatttttgttaagcagtttactggcagcactacataggctaattagaccagaaaaataaatgaaaggcatccaggttggaaagaaagaagtaaaaatatacctatttgcatatgacacaattctgtatatagaaaatcctaagaaatgcaaacacacacgctgacacacacacacacaactatcagaactgataagttctagttcagaaaggttgcaagaaacaagaagaatacacaaaagtcaattgcatttctatatactagcaatgaaaggaaattaagaaaacaacttcatttacaataacatcaaaaaaaaaacacttaaaaataaatttaacaaaagaaatgcaagacttctacactggaaactacaaaaccttgttaaattagatgatacctgaataaatggaaaggcatcctgtgttaatggatcatatgacttaatattgcttagattgcagtgttccccaaactgatctacagttacaatgcaatcactattaaaatcccgttttttttttcagtaataggcaaactgatcctaaaatttgtatggagattcaaggggtccagaatagccaaaatagtcttggaaaaaaaaaaaaaagaacaaagttgaatgactcacacttactacaaagctactgtaaataagattgtgtggtactggcataagaatagacatataggtcaacagaatagaattggaatacaaaaataaaaacatacatttatgtaaaattggtacaagggtgacaagacaattcaagggggaaagaatattcttttcaacaataatgctgactcatctggatatccatatgcaaaagaatgaagttgtatccctaccttacatcacatacaaaatgaactcaaaatggatcatagacataaacataagacctcaaagtataaaactcttagaagaaaacataggagaaaatctcgagccttagactaagcaatgatttcttagatataaaacctaaagcaaaagcaaccaaggaaaaagtagataaatcgggtggcatcaaaagttaaaacttttgtgcttcaaagtacaccatgaaaaaattgaaaagacaaccagaaagtgggagaaaatatttgcaaatcgtatatcagattagagacatatacaaaagatataaaacaattcacaacttagcaataaaaagacaaataactcaatttaaaaatgacaaaaggatttgaatatatatttttttcagagaagatatactaatggccaataagcatgtgaaaagatgcaaatattattagctattagagaattacaaatcaccatgagatataatttcatatccattagaatggctataatcaaaaggacagacaagaataattagtgaggatataatgaaattggacccctcatatgctgttgatgggactataaaatggtgcagccactgtaataaacactttggcagttccttaaaaagttaaacatacaagttagcatatgacctggcaattccactcccaagtatacactcaagagaaatgaaaacatatgttgccccaaaagttgtacacaaacatttataacagcatcattcaaaatagccccaaagtagaaacaacccaaatgtccatcaacagatgaatgggtaaacaaaatgtggtatatccacataatgaaacagtactcagctatgaaaagaaatgaagtactgatacatgctgcaactggcatgaatattgaaaatactattttaagtgaaagaagccagacacaaacagccacatattatatgattatataaaatgtccagaataggcaaatcaatagagacagaaatacatcagcggttgccaggagctgagggagggggaatagggagtaactacttataaatacggagtttcttgctgggatgatgaaaagctttttgaaattagacagtgactatggttgtataactgtacatagatactaaagtactgaattttacactttaaagggaagtatttcattgtgtataaattacatgtcaatgaagctgctattgttttgaaatcgcaatagcagctgccatgtcttgaatgccaccgtgtgccaggcacagtagtagggggttacaaaaactagctcatttcctgcacaggccaggcatctgaggttggcattgtcatccttcttttatagatgaggaaggcaagtttcatagttaagtcacttgttccacaatcacacagttggtaagtggcctaaatgggatttgacctgaggtctcaaactcttcaccatacattacacaatcttggactgcagtggaggtggctggggacaggtcagaaatgaatcagaaacaagactagttacaagaactcagactccagatggggccagaccacctacaaatgtgacctgatactgaactctgaggggctgaactctgtgtatctcccttaacagactctaagggaggttctgagactcaggcaaggctgagcccataggaatggggcaaaacgtgttagttttggacagatgagacctgtagaagcagtcaagtgatgccacaagatccttaaccagctgaaatgcagacatcctgatccagggaatcatcccggaggttgggcaagatgctgtcagggtccagagataaacaagaccctcctcccaggagctctggacggccttccaacccaccacccactttgcagtcctcacagaaatgtccacttcgatgttatcatgagaggaactgtttccagacgaagtcagagcagaaccggcccactaggggccacaacccacaggctataaactgagggatctggagaaggttcttaattaaagagtgtccctgggggaacccctgcactgggtctgaaattccaatcatggactctgtccccttggatgtcttcaggaacaagtcgttatgaaatggttccaggaatgatattggtttggagcctcctagcatcaatagcactttttaatagcacattttgtgcaaactacctcttcacttttggatctggtgtggtgggatgttaattaggtactcatggggcaggcagattatgtaatctgggtcgtttggatgcttacaacaggatgacaaggagacagagcatggtctctgagttacttcttccttatctcccaaagttttcttggtgtcttccttacatctagagggatcaggagaagtataaaagaggttatggaaaggaaagctttgcgggccactgtctgacttggcatttcagtgcctgctttgagctttgcatgatcatctatgtatcctttttcctcaaagcaagaagcagcagcatccatgaataccactgcgtgggtttacccacagcagagggcaggagcttgcgtgttacactctgcctcttacgtactctccctgtttctttctcccaccacaaccccactgccaaaactgtgtttaagcattgcaataaaaacactacattattatgtaaacaagccaccactctagctttgaagaatgctatcaatttcatgaagtccttgggtaaattcaagaatcaaagagttcagcttcatttttcaatggctaagatgtttctctggaggcagttcccatccttcatgatgccctaactattcttttttttttttttttttttcttaagacagagtctcactctgtcacccaggctggagtgcagtggtgtgatctcggctcactgcaacctccgccgcccaggttcaagcgattctcctgcctcagcctccctagtagctggtattacagacgtgcaccaccatgcccggctaatttttgtatctttaatagagatggggtttcaccatgttggccaagctagtctcgaactcttggcctcatgtgatctgcccacctcccaaagtgctgagattacaggcgtgagccaccgtgcccagccaacctgatcattcttcactctcttgttgggctgtaattgggtagatcttctggatgcctctttagttcctcttttacctctaggctggaaactggtccatgttccagtagactgaggcctaatagtacctgaggtttctactttagtctgtagggcctgtaataccacattgccccttgggttatatttctgcaaaagttttgtcttttccaaaattaactgtgtattctgcctccattgtactttgaggagtgagaccaaatccagtaagttttctaatatttattttcataactggcaggataaaatgccttctaaaagacaaaaagattaaggtgagactagctcatccattagtaatttacagtttcagacagtaacatgtttatatggcaatataaaattatttggtgctctttctgagttgattgagtgaatataaatggaaggaaagtcagctggaggagagggagaaagagagggagaggagggccgggcacagtggctcacacctgtaatcccagcactctgagaggccgaagccagaggattgcttgaggctaggagtttgagatcagactgagcaacagagtgagactacatctctacaaaaaattttaaaaattagctgggcatgggggcacacacttgtagtcccagctactcaagaggctgaggtgggaggatcacttgagcccaggaggtcagtgttatagtgagccatgatcacaccactgcattctggcctgggcagtggagtaagaccctgtctctaaaaaaatttaattaaactagaaagaaaaaaagagggagagcaactctttaatataacttaggagaagtggttcactatagaactatatctttgttacccataacaaaaatatgggcaattacgtcttgggaggttttagactatgcatatttacataaaaataatggctcctcaagggccattatgaattactgaaaaataaaatattcattgctgtaaaactgaaattaacctacataaagttttcctggagtctacatctatagaatacatttttgttgaggagaggtctgcctgggagttggtacgctctaatattcactataagtaattaaaaattgagcatctgcagaagaatgcctcctctcagagcaaagtcagccaaatctctcagaatagcagaagcagaaccaacttaacatttcatgactcctgaggatgagcacagagagaagggccagggagatgcagcaggaagagaaggggagggagagctcaaaacacagcacaggactgcttctaggttctcaatatcagcatttctggcctgacagtggtgtgatttcagggtcttggccaccacgtctggcttggtgctggaaattctacatatttatgtacatattttgtaataagaccaaacttcaaaagtccctagaaggagtgccatatgaagaaggctttttcaggggaagaggagaaaaaagttgtgagtatcaaggcaccagaggtggaaagaagttgctactaagaggtggaaagaatcccaacagaaaaggatgcagccctgacatctcagcgacccactgcttctcacaagtgctggaggagggaagggccacactgcctgtactcccaccaggtaccccatcagatttctccacggttacccccaggttcccttctgctttcaggatcagagaaaccccaaacctcctccaatctttttcattagtcctatccaagtggtatggatgagggaaatgggcaaggaaccagcagcatctgctgcagggtgtgcctgtgtgtgtgtgcacgcgcacaggtgtgtgtgtgcatatgcgtgagaacatgtgtgtgaaatatctccgtagtctcttctggagcctgaaatcaaaggagactggagcatgctcttatcctgccacactgacatagtctttctgctatcaatttaatgaacaggtattaaataaaggattaagaaaatgagtaaaatgaagagagtgttctctcagtgggtttcaggctctttctctctgccttatctgtgcattaccactgagtaactaagaataacctttggccctaggtccaaggcttgagcatatgtgtgaagtaagtgaagcatggtttggtctttttctagcagccgtctacccaaagcatcccagaatcgagacacccattctccctccaactctggggtgggggttgcactaggtggaaatgttatgtcacaaaagcatcaacactcaaacaatccaaattcaaatcccagtccccggtacgaccatttcagaaacctggtagtatgtgctgggaatggtggctcacacgtgtaatctcagcactttgggaggtgaagatgagaggactgcttgaggccaggagactagcctgagcaacaaagtgagactcccatctctacagaaaaaaaaaattagctgggcatggtggcatgtgcctgtggtgccagctacacgggaagctgaggtgggaggagtgcttgattccaggaggtcgaggctgcagtgagctgtattcatgccacagcacttcagcctgggcaacagagtgagattctgtcacaaaagaacaaacaaagaaacaaacaaaaacacagtatctactagagctgacccaacaatttcacatacacatctaacacatatctaacgagtgtattagaaacaagagcttatgtctgccaagacacaagtacacaagtgttcatagcatatttattcatatttccaaactgaaaacaatttaaatatccgccaatgatagaatataaatatactgtttcaccattcatactatggaatactacatagcaatgtaaaggaatgaattattgctatacacaacagatgtaatattgagtgaaagtagtcagatatgaaggagcacatactattaatacatgattccacatatacaaagttttaaaacaggccaaaataatctatggtggtagatttcagaggagtggttatctctggagggagtgttgactgaaggcacaagggagcttcctggagtgctgggaatgttctggatcagggtgttgacgacatggctgtatacatgggcaaaactcgaatgatctatatacttcaggtgtgtgcacttcatcacttgactatatgttaacacattcaatttttgaaaaaataattgtcttaaaattaattttaagaagtgaaccaaaaacaaatctcagcctgcttctttccaccaaatgttttgatcataaacaaaatacttcacgtttttaattttaacctcatatccttcacttgtaaagagggtgttaagagtcttcagcagtcagtttcataacatttttttgtaaaaatccaatgtgcagcatctgtgaaagtgctttggaaactttaaattgttctacgaactgagtgtgactttcggggcgggacataaaaaagacctgcaagcacccttcattctagatcctttccaagtgatatgtggcaaactacagatttgtcaagagatttggctcttatcaattcatcagacccaaagcatagttatcctatttctcaatattagttgcttgatttttctccaattataagaagtgagactgttcatctgaccatcgcattatatgtaaactccagatttttagacgaacatcccctgctttgtcacacctgaatggttgtggctctacctctcgccttcccttgagaaatgttaatttttactaataggtatctgcatgcaagtcgtatggagttatcttacccataatttggtagattttaaaaaatgatttccatcctctctttggatgaaagtttggtttctgatttcttaattatgttcaagtgcatcaggaatctgacctaagaaaccaggtactaaatgtgttctaggaccaaactacccaacgaaaactacttgttgacatagtgccctttattaggaaaacacttaaattcacaagagatcaatatttatcctgttggccagaaacccatggacttctgtaaacgtccattttcaggtcagcagtttccagagtggtgccagtttcactggatgtggtgctctcttgccctccatttctggaacaggagtctaacctacacctccctcagctttactcgctgactggctggtgaactctgctagagtaggcagagcaccattaatgttgtgattgatcatgtagcttgttatgaccaaagaaatatgtatttaccactgtgcttgacacctaatcagcattcacacatgcaaatgaaatgaatttgtgaattttaagagaaaatctaaattcaatacctctactcctgggtggttttgatctacatggcatttatttgttggtttgcttttcagttccctcccctgctcttttctgtgtcactgaggggactggctcttgcaaactatatttcccaggcttctctgtcaattgttcccaggtaggttcagccactaaaaggcactagcactaaagagaagaagccaaggtatttctgcccctttctcttcttgggaggaaggggatgcatctctagcagtggctgcgtctcttctgtacttccagctcccatcatacagcccctcctccccatggccccaaatcccacctacctagctggcagaggttcccactcctaccaagtggctaatgtttctgggctccgggtaggctcatcctttctttatccttccatccctatgggcgtagcagcgcctgcagttgctaatctttgggttttctcactttcttcttttcttccctttttcaacttttctgtgtattgtttcctgtatcaaattccctctgttggcttcattttcccagctggattcctctgatggaaaatctatctcaggagccatgtacaaaaccatgatttattctaaagcctagttccgaaaggaggtatgtttgttttcccccttaattatttgagagcatttctgaaagatactctttcctatgtcttattttcctggtattttgtagtatttgaaataagattatattcagaacattaacagcaatcaaaaagctaagtctgggccaggcacagtggctcacagctgtaatcccaacacaatgggaagcgaggcaggaggatcatttaatccatgtcaaaaaaaaaaaaaaaaaaaaccaaaacctaagtatgcccaatattggaaagacgccaactgttcctaaattgatctatcgatgtgatgtaattcctgtcaaaatcctaactggttttttttttttcatgaaaatagacagttgattacaagatttgtatgaaaatgcaaagggccaaaaatggcccataccatcctaaggaaaaacaaggtgggaagacctttttcagcagacatcaagacttaatggccagacacagtggctcacacctgtaattccagcactttaggaggccgaggcaggctgattgtttgagcacaggagttcaagaccagcctgggcaacatgatgaaaccctgtctttgcaaaaaatacaaaaaattagccaggcacagtgacacatgctggtagttccagctatgctggaggctgaggtgagaggatcacttgagcctgggaggcagaggttgcagtgagctaagattgggccactgcactccagcctgggtaacagattgagatcctgtctcagaaaacaaaaaacaaaaaaacaaaaaaaaaaacaaaaaaagaagacttattaaaaattaagaagatatggtgatagagaaagtgtggtgctgcttccaggaacaaatagttcagtgatatggaatggaccaatgttctggaagagtctggcaacttacctatggactgtagatatttttttcaaagtgacattgcagagcagttgggaaaggatggtcacttcaataaaaatttccagcacaactgggtgataatatgctaaaaaatgtggctggggacagttgttcatgcctgtaatcccagcactttgggaggccgaggtgggcggaccacgaggtcaggagatcgagaccatcctggctaacatggtgaaaccccgtctctactaaaaatacaaaaattagctaggcgtggtggcgggcacctgtagtcccagctactcaggaggctgaggcaggagaacagcatgaacccaggaggcagtgcttgcagtgagcccagatggcaccaccgcactccagcctgggcaaccgagcgagactctgtctcaaaaaaaaaaagcttctccttatggctgttttttccatagagatctaaatgtgaaaggcaaaaatcataaaacatttgtacaatgatgaaaaatttaaaaagaaagctaagtctgaatgtgggaactggctgtaggccagggttgccttttttttcttcattccaattgacaaaaataaagagatctttcctgcttcaggacttgatgagtaatgaactcagaccaagcccccagcctgagaagccacaagatgatgttaacattgtttaactccatgcttttcaagggagcaagaagagaaggaaatcactggaaagtcgagatgcagatgctcctggaaggtggtaactttaaagaattgttggcaatcagcgcatcttaaagagtattagaacccttatataatttcagctctagaggaaaaattgcttgcagatctgcagtcaaagaacagccctcactcaacagcttctttttctgtaccttctgctctacagaggttttaaacagactcttttgtgccccaaatattcttttttcaattttaaaagtatttcagatttcagaaaaatgcaaaaatagtaaaaaaaattcccttatacctttctcctcaattccctgaatgttaacattttgccatacttaccttagcattctctttttctctatctttatatttttttctaaaaatgtgaaaggaagttgtacatatgatacccttttacacctagtcacttcaagatgtgtttcctaaaaacagggacattttcttacataatcacagtacaattttctttctctctctctttctttgtttttcttttcttttttttctttctttctttctttcttttttttttttttttttttgtatttttggtagagacatggtttcaccatgtttcccaggctggtcttgaactcctgagctcaggcgatccactcgcctcagtcttccaaagtgttgggattacaggcgtgagcttccacacccggcacacagtacaactttcaaaatcaggaaatcaacactaatacaatacaatacaatacaatacaatacaatacaatacaatacaatacaatacaatacaatacaatacagtaacctatagatcttattcaacatttatccattgttccactaatatcctttttaagtccattcttttaactgttctgtggctgtggtcttggtgaaatactttccagctttttcaggaagatgtagccattcattcagcacatacaaaaagaatttgaacctcattaattttcaagaaaagtaaactgaaacctcgcttgagctgtgcatgcagacatcttcattccctgaatgaagagaacccagtgaagtctcactccgttccacaaagcctgtgttattcctattctgtgcaggtcacctgcctgctgctgcttcccgattcctcattaggctgagggaacccacatcaaaaatatcctggaagatgctttcgtctttttctcacacatcataacaaaaatactttactgtctcaatttgaaagcaagagaggatgcacagggtttgtagcatcgactatttcttactagcaggttattacacgacccacccctgagactaaggctgtgttgtaaaggagtaaagaccaaagggtaacaacctgaatgaatgctcattagaaaaggaactggttaaatacattctattgtatccattcaatgtaatacatcattcaaaagaagatgcagctgtatatgttccaaaataagtcaaacctaaattataggagtagtaaagttgtgttgactgaaagaggaattgaggaacttgagatttggaaataaagggagaagggagacttttatagtaaatccttttgtaccgtctgattttttttttaaaccatgtgtatatgttatgtattcagagagggaggaggaagagagacagagaatcatgaataggagatataatcatggataggtagatggatatgcagacaaaaagaaaagtttgagagaacagcaggtcccatattctccggctgcacttttaacttttaaagctatcactgtcttttccattttccctgaccaaccatttagttctctctcggtagcaggagtgttttcctcagctaggtcgaggagacacaaacagacctcgtcacgcacacatctcagcacacaggcatatagtctcaaacacacggttttagatttgatggtgtgtggggggagatggggagcaggctgaggcactcgaagcgggacctcccgcctcccctaccatctcagatctgcactactcccctcggccgtccattctttggcccgcctttcccccacccccgctccagaccctgcacaccaggcgactggactggcgtaaatttccgcccatttgcgtcgccgcctgggggtgctgcttcgtgacgtcagggctgagctagggggcgcccgctcctggctgcccgctcctcccggccctgcggcccccgcctgccctttaaaagagcggggcctgcgccggccgcgccacaccgcggggaccaggaggcacgctggttttccggggccgctccatcgcgccttcctcctgcgcctcgcttctccggtccagccgccatcttcctttccgcacaggggccgccgagcggggccatgcagccaacgctgcttctcagcctcctgggagccgtggggctggcgggtgagtgggcgcggcgggccggtcagcaccgcggacagcgccagcctcgctcttccccgccgctcccgcagccaggctggcggatcccgggagagagggagggttgaggggaaggtttacctcttgcttcgtttcttctcctccctgggtgttttccttcagctcctcccacccgtttgacttggaaaaagctagagggcttcctagcccaaccaggggagcctcagtctttctgtatctgagttttcctctagataggaaggaagaaaacgtgccatacctgcaaggaaacctcacattttgtattcgcttctaagatgtcacactctctctgcccgtctagagagattctgttgtctgattctgtatctgtttggctttttaaagccaggcgactacagagaggcaggaatacatgtatgatgctatttagtgcctgcataatttcccttattattgttattgtcatgtaagtatgatgagataaaagtgagtcccatatatatataagatatatcccttttcttaacatgtccatatataatgtgtgtgtatgtgtgctcatgtatgtacaagtttaatataatatgttcctctattttgtatttccatctctagggacaggtaatttctaatttcacactcaaaggaattatttttttttaacctgtgaaagcctcagcagtcctgagaacatgtgctcctcattttttagttatgaatggaaaccgcagtattttgacttctgtactccaggaaaattattagagtacaaaataaccacaaaagttcctttggagtagtaaaaaaaaaaatgttttagccaatttaggaggattgaattttaagtagtagatatttgactgtttcccttttgtagggaagattgtaggattaatctttcaaactaccctgaatctcaaacaaatgatctctgaagatctgaagtgtgtgtgtgtgcatgtgtgtgtgtgtgttgaagtcgagtcacctaccggtattgagatattgagactattgagaagtaagtatactagcaccaaattaaactacaggttttcttcagctgttttaatgatttagaaaattgtccatatctgagattgagactcctacctagaattgagatactgccatccatgaatatgaagcttttattggcagcaattactagatccaaaaggtagaaacaaaatgaaagccagtcgtaattaattttattgtaagctatatacattcagaatttgctaaaattcttgtcattctcacaaattgtcaataaatgttctcaatttcattaaagaaaatcaaatgaatatttataattatttctggtcaaaatactttcagaaaagaattgctttgcttaggaggctgtagaccacaaaaacagtgacatttgtgggaatgatttaactattgtggtacaatacttacagatctcttatgtaacagaatattttaaataaaagtttatattttaatagcagctaaaatgaagacataatctttttaaaaattgagcttaatttgtatatcatataatccacgcttttaaattatatagttcagtggtttttggtatattcgcagattgtgcaactattaccactatcaaatttcagaacattttcatcaccccagaaagataccacaaacccattagcaagcacctctccattcccacctccccacagcctctggcaatgagacatgttagacttcaagtagagctggtaatttgcaaaattacagggctgggggaagcctcaagaaaccatctagctcattcacttatccttaagaacttctgaaagatatgcacaaccttctatggaagctattgtgcactctaaaaattaatataagggaagtagtaaaatgatatccatattattctaggtaaaatggtttctttatctttctttttcttttcttttcttttctttttttttttttttttttgagacagagtcttgctctgttggccaggctggagtgcggtggtgcaatctcagctcactgcaacctccatctcccgggctcaagcaattgtcttgcttcagcctcccgagtagctgggattacaggtgtgtgtcaccacgcccagctaatttttttgtatatttagtagagatgaggtttcactatgttggccaggctggtctcgaactcctgacctcaggtaatccgccagcctcggactcccaaagtgttgagattacaggcatgagccactgcacccggccgggaaaatggtttctaaattcagaagagcttatttaacttattttacagttatattttcaatccagtatcaaaccttaacagtattagatattaatacatcagaagttgctctcagatttaccagattatttgataatttttctaccatttgattgctttacttttaacacgagcagtaggttttctttttttttcgtatatacctacagagagcattagattttctgttgtgccacctgaatcttactgtatgcaaaagtaagttgaactactttaaggatgacaacatgcctttggctattaccttgttgtcacaaattttaccggaaaaatacagaagcacctagatgtctcaccaagatgtataatgtatgttcaaaagcagaccctagtttttttttccatcaaaaagagatctgaagagcctcagtcagagaaacaacggtttcataaatacaaacctaagctacaagttgtctagagtaataaaagaaaaatctttctctgcccccaaatctggtaactattaatacttcagcaataccagtagttaataaaaacatctattttacatttgtaaaaaaaaagggaaagtattagcaagaaactgcattatcaagaaggcttagtaaagctgcattttttaaaagtcatctgatttattaggggagttattctctcgcagtcatttatttgcagaagatattacagatttccagcggaaagagaaagtgctgaaatgggtgtgttctcaagtagccatttggaggatgaaagaacagttgagtatattggaccttgggtaccaaaagtgggccaactggatcttgcctgataagcatttcaggaggaacttggggtcttcatagcataactttgggcttcttgaaacagttgaagtgatcccagatcatgctttgaaaagaaaaatttggtaaagtaagtaaatgaataggtgttttatttccaggttgagccccatgatatgtaattgatagggggtggggaatgtttaaagaggcttagagcaaagcattttgcaaggaaaggtcaggttgctgcatttgaatagctttcatgtctgatgtctgagaacttgccccagctagctctactctcttctcagggacttagaagaattttctgcactagcgtctcctgctcagttgcctgctacaggaatgccaggagaactgtagagatggacttacatgtaaatgctttgggctgttctaatagaaagggcttagaacaaagtcaaagtgaaaaaagaatcaaagcagctttgagacagaaaaaaaatggcactgaaaaattaaaattacctgaagcatttttgaagaagacaaagcaacttcaaacactgttttaagataggcggaatcccatgaaattttattgaaataaattaaaatttttcttttaaaatattcttataaaccaatggttaaacaccaatttgcataaaatattatggacttgatgctgtactaggagggttagatatctgccatgttctttacatggttgcaaacagtgtggagaaagagaaacacaatgttgatacggatgcataaacgagcttgttcaggcaaaggccttgcgggtgaaaaatgaggtaattaattatggaagacatccataaccatgtttttgtcaaggaagtaagttttgggaggatatatttttggaaacagagatacggagagagagccacagatctttacctatttggggtaggcagagaaggaccaaggagggcattcttgttttattagacttagtttggtttaaacttttttttttttgagacggagtctggccctgtcacccaggctggagtacagtggcacgatcatggctcactgcaacctccgcctcctgggttcaagcaattctcctgcctcagcctcccaggtagctggcgcgtgccaccacgcctggctaattttttgtagttttagtagagacagggttttgtcatgttagccaggttggtctcgatctcctgaccttgtgatccaccagccttggcctcccaaagtgctgggattacaagcatgagccaccgcacccagccctagcttaaacttttaattgaaataaaatatatagaaaatggaacagatcatgagtatacagcttaatacgcacacctgtgtaaccagcactgagattaaaaaatgggacatttctggttccccagaagtcccctccttgtctgtggtctagatttgatttataccggatctaaaatagcatttgtttccaaatatatttaagacattgccaggggaaaaacaacaactaatgtggggtgattttgtcagttggggtcacacagctttcaaaaaccaactcaagtcattttccattctttttctccttcaaagctgtcaattccatgccagtggataacaggaaccacaatgaaggaatggtaagttgcaatgtcaatcttagaatctagacttgtgtctagactctagattctcccagtccctattataccaaaccaaacacacgcatgacataatcttacaaagccaggttttcattgctgacagaatgtgagcaagggatgcccctcctgcactgagctcctatgtcctgtcaggatggtttagcacccctgaggatagctgtgccattggttcagaaatgggtgtttatttcccttctccagataatcccaactcagtgccttcttgcattattctgtgtagaagtttggaagatttcattctgttcctgtaaatctgtatctccgccctaagaatactgcatcagcccaggtcacgtaatcaagtcttccttgacagcagctctgggttgagtagtctgtcatccagtgataccagcttctccaacctgctttcgggtttccccccaggtgactcgctgcatcattgaggtcctctcaaatgccttgtcgaagtccagcgctccacccatcacccctgagtgccgccaagtcctgaagacgagtaagtgtcccacacggcaggcagatcttggtcactgcagtgatccttgttcctactccctccacatcaccttctactttatctacaaatgacctgggggcataatgcactaggaagagtattgattgactaggccagtatctgggagacagaagatatgactcctagttcctgctttaccacttcgcagctgtgtgactataggaaagacagtttgcctctcttttcctcaaagtaaaatgaaggagttgaactcagtgatagtctttcagatgtctatccgttcttaaattccttagttccatactttggatttttagaaccggacttcctttgggtggagggggtttgggaaatgctggtttgtgattagatgaggaggggggttatggaagtgttggacaatgacagagggagatttaaaaatcattcttctctttgccttttgctcttctgacagtgagaatcaggaagctgagaagcaagaaacttagaaaggtgacttaaaattctggcctatttacacaacaaattagctaagatattttaatgtatagcttactagaatagaaggtgccaccaaatggtaccaggagttccaggcctgagaactggaagggtttcaggtagaggcagtgcattccagtgaggcagactaatggctttctgagtccagcctgtgaagtgttctcaatatgaaaccatttctgctgaaaataaaatttgaacagtaatataagcagtacccattggaaattgacattatgaggtcaattttacaaaactatgcagtctctgttatgcatgaagccacactgattcaaacaaatccagaaaacactgccctcttcaacactgtcctctgcttttaaacttttagtcaggctgggaacagtagattttatcttattttttcacctttaaaaatctttcaggtgggcatagtggctcacacctgtaatcccagcactttgggaggccgaggcaggtggatcacctgaggtcagcagtttgagaccagcctggccaacatggtgaaaccctgtctctactaaaaatacaaaaaaaaaaaaaaaaaattagccaggcatggtggcaggcacctgtaatcccactactcaggaggccgagacaggagaattgcttgaacttgggaggcagagactgcagtgagccaagattgaactccattgaactccagcctgggcaacaagagtaagactccatctaaaaaaaaaaaaaaaaaaaaaaactctcattgccaccagcctggccaatatggtgaaaccccatctctactaaaaatacaacaactagttgggtgtggtggcgggcgcctgtaatcccagctacttgggaggctgaggcaggagaatcgctagaacctgggaagcagaggttgcagtgaactgagatcgtggcattccactccagcctggatacagcctgggtggcagagtgaggctccatcaaaaacaaaaacaaaaacaaaaaaaacaccaaataaacacctctcgctgccagacaagactctcttgctatagctatacatgagccctcatgcatgaaatggtaaaaagcaaatagtgattggccaaaagagtaacctgaggccaggcgcagtggctcacacctgtaatcccagcactttgggaggctgaggcgggcggatcacaaggtcaggagatcaagaccatcctgtctaacacagtgaaaccccatctctactaaaaatacaaaaaattagccgggcgtggtgacacacgcctgtagtcccagctactcaggaggctgaggcaggagaatcgcttgagcccaggaggtggaggttgcagtaagccgagattgccccacggcattccagcctcagtgacagagcgagtctctgtctaaaaaaaaaaaaaaaaaaaaaaaaaaaaaaaaaaagagcaacctgaattaattcaatctttgggggcttcaggtaacaatggtagctgtgggggcctgagcctttagggaccctagaaacagtggatggaagctttcctaccactcccagcccacatacctctttctgagtttctttccaacttcttttttccagcagttacaggaagtgagtaagagcagagtgggtcactaggcagagagtaaaggctgctccttttggcaaacccatcttggtatctccctttccctttctttgtttactagaccaatgcaaaagtgaggggcctgtcccatcagctcactaaagaaccacagttgcttaggaaaagttgcctatgcctgcctgccaagatcttagcccttagattatggcatagtaactctagcctctgctccagccctgattatgccctgaggtcttttggtgtctgttgagagagacgtagggaaactgggaaaaatcaaatgtatctaaggatcctggagatgttatacccagagagtgacagaatgctgagatggcgaaggtttaagagctcttctgtggttgagccttaaacaccaggcagagctagacagacaaataacacaaaagagtaaggcaggacaggaagtgactcacagactggagggcacatgccttttctgagagggagcaggtaattctcagctctaaacccgttatggagaaatacagactatgttgtcaaatcttgggatttttcaaaagaagttaaaattttgatttttaaaagacatctcctggtattttcatatcgcctctgaattcagatgtactaaaactgctgtttaggtcaaacagaatttacctctgatgcaccagtttgcaacttttatcctattctagttctctctctcttgttggcatgtcgtaaactgatcagaagactggtggagcttttgcccaactggttggatgaatgcctttatacagcctctgttccaccccacgcccatctccactcccactcctacttgcatgtctcagagtcagcatatactcactgagcaaatgagtatttggggagtaggacagaatcattgttttatggatttgagagacctcagggaagacgtagtctaatttcttcacaggtacaagaatctctttgactagggttgatctggtcatccttacagcatgacagatgcatttccctgttttcgcttgaaagtaagtgtgagcttcacagcttgattttacagcttgacagtgagtgtgtgctgctatcacagcctcttccaggcccacctgcggggcttaaagctaaatttagtaggaagagctaagcctcaggcacatgctgctcaggcagtacatatttaattgggaaaaaataaaaatacttctgttcctgacacttaagactcacaaaccagtaggcagtaggaaagggaccacagtgactcggcccctggaggctgagatcttgtctgatcagctctatttcaaccaactctcagaatgacatcagtatctgtctgtcttagtcagcttgggctgctatatcaaataccatagattggatggcttaaacaactaacatttatttttcacagttacagcagtcggaagtccaagatcagagtgtcttatgagggcccacttcctggcttgtagatggctgccttctgtcactgtatcctcatctggtggagacagaaatcatctctttctcatatctcctttcttagggcactaatcccattgtaagtgctctaccttgatgacctaattacctctcagaggcccccacctccacgtgctatcacattgaggattagggcttcaacattttggaatcacacaaacatttagtcaatagcactgcccagagccaccatgcttccctgtgcccatctggctagccatgccccaatgctatacacaccaccactggcttttaagaggcaaagagactggtgacagatgggccttctctcagatgtctggaaaaggccagggacattttcattgcctcataaacatgagaatattattatcatgccagactggactttaaacagagaggtacagagagtccactatttcttggacatttttacaaaataaataatttttttccattttgcaaatatcatttcaaaataacttatcagtgccacccaatagaaatataatgtgagccacaaatataatttcaaattttatagtaaccacatttaaaaagtaaaaagagacaggtggaaattaatttcaataatatattttatttttatccaatttttttctgatatataattttataaatctgatctatttgaaatatatattatccaatacatccaaaatattatttcaacatataatgatataaaaattgttgagattattttacattattctttattctcagaagtctgatgtgtatcttacatatatagcatgtcccagatcggaccagccacatttcaagtgctcaacagcacttgggcttatggtgcctgcagtgtagacccagagctgtcagtggccttggcttcaggcattttatctgaactctgtgacataggttgaaatccaagccctcccagctaacaactgagacaatgctaactgcctatctcctttcatggggtgcccttgagttaaggaggacttagtaaaggagctattgatatttggaaaagatggacgagaacagcattcaattaaaatatcagttataccatgtactctgactctggaaacacaaagataactcactgtgctgaagtctgtccccaacatctgagaacatgttgggtggatggaacctgagtgaagaaagaaatggccctttccactgatgtgcagttttctcaggcaagaaatgtacacccttatcaccagctactaagttatatatcacatactgctaggttgagcctacagttgattggataataaaagtctgatataaactaataatttcaaatgtttaaatcctcctttgaatcttgatatttcttattttggctagttaactatctagctggattattgttagagccattcacatagtgctaactttttaactcctacttgaagaaaatatggaaagaatggtcttggattataccatgctgagtctcaatgtctgcaaaaagaagaggttggactggattagatgaattctaagatgtttcctgcctctaaattctaatatttcataaatctatatctcgatttcagtttgatcattggtagtaccaatgagagaagctggctgggcattatgaagacataaaaatatagacagtttattaccagatttaaacacagtcaaggagctttcatagcatttactttcaaaaggaatctgagtatattcttcattaacttaaataattatccaagcaattttcagtgtcatcaggatttgtagtgattactgaggctggtgcttgtggaaccacaagcaattctgaaattatacctactcttcattttcattataggtagaaaagacgtcaaagacaaagagacaactgaaaatgaaaacacaaagtttgaagtaagattgttaagagacccagctgatgcctcggaagcccacgagtcctccagcaggggagaggcaggagccccaggggaggaggacatccaaggcccaacaaaggcagacacagagaaatgggcagagggaggcgggcacagccgagagcgagcggatgagccccagtggagcctctatccctccgacagccaagtctctgaagaagtgaagacacgccattctgagaagagccagagagaggatgaggaggaggaggagggagagaactatcaaaaaggggagcgaggggaagatagcagtgaagagaaacaccttgaagagccaggagagacacaaaacgcttttctcaatgaaagaaagcaggcttcagctataaaaaaagaggagttagtggccagatcggaaacacatgctgccgggcattctcaggagaagacacatagccgagagaagagtagccaggagagtggagaggagacagggagccaggagaatcacccccaggagtctaaaggccaaccccgaagccaggaagaatctgaggaaggtgaggaagatgccacctctgaggtggacaaacgacgcacgaggcccagacaccaccacgggaggagcaggcccgacaggtcctctcaaggagggagtcttccctctgaggaaaagggacacccccaggaggaatctgaggagtcaaacgtcagcatggccagtttaggggaaaagagggaccaccattcaacccactacagggcttcagaggaagaacctgaatatggagaagaaataaagggttatccaggcgtccaggcccctgaggacctggagtgggagcgctataggggcagaggaagtgaagaatacagggctccaagacctcagagtgaggagagttgggatgaggaggacaagagaaactaccccagcttagagcttgataagatggcacatggatatggtgaagaaagtgaggaagagaggggccttgagccgggaaagggacgccatcacagaggcaggggaggggagccacgtgcctatttcatgtctgacaccagagaagagaaaaggttcttgggtgaaggacaccaccgtgtccaagaaaaccagatggacaaggcaaggaggcatccacaaggtgcgtggaaagagctggacagaaattatctcaactacggtgaggaaggagccccagggaagtggcagcagcagggagacctgcaggacactaaagaaaacagggaggaagctaggtttcaagataaacaatatagctcccatcacacagctgaaaagaggaagagattaggggaactgttcaacccatactacgaccctctccagtggaagagcagccattttgaaagaagagacaacatgaatgacaattttctcgagggtgaggaggaaaatgagctgaccttgaacgagaagaatttcttcccagaatacaactatgactggtgggagaaaaagcccttctctgaggatgtgaactgggggtatgagaagagaaacctcgccagggtccccaagctggacctgaaaaggcaatatgacagggtggcccaactggaccagctccttcactacaggaagaagtcagctgagtttccagacttctatgattctgaggagccggtgagcacccaccaggaggcagaaaatgaaaaggacagggctgaccagacagtcctgacagaggacgaggtatggtctagggcttctgtttaaaagtacttactctggtcaatgttagcacattatgttcaagactatccgatattcacggggagaaattggtgggaattaatcactatgaaaatggtgctctagtaatggagtggaggccaccttgggggtcggtttccacctacctctagccatcgtccacatccttgtccacctcactcggttgcattgcttctcaaccttgtctgcacactggggtcacctggagagcgtgaaaaattactgtgttagagattctgtctacttagttcctagggtgctgcctgatcatcagaatattttaaagcttccagatgattgcagcgttcagccaacgttaacaactgctgttctggtatcttccccttggtcctcttattgttcatcactctctccctgaggcagggagaataggtgatagagaagtttacttgcttgcctatttagtttgctatctttattatttcatgccctactgccatcagaaatttgtatctgggagaggtaacactactggagctgaacctacccaaacaatgttttttttcctaatattgattatgtaggttggtgcttctcaaagttgaatgtacattaggatcatgagggattcctagcccccagagttcctcatttagtaggtcccaagtgagaccccaatatctgcatttctgacaagttcctggctgatgccactggtcaggggaccacactttgagagttactgaggtaggttgactaatgcagcttctaacatgcctaaaattcccctttgcactcatgctccatcaaactacagcaaaagaaattggttcgggacctcatgcctccacttttctgtattttccagaaaaaagaactcgaaaacttggctgcaatggatttggaactacagaagatagctgagaaattcagccaaaggggctgactgtcattggagcggtgggcactgttaagaagcagccatcacatgatctgtttttcaccacttcactgaaagacaccatttatctacccaagggcagaaagtagaacttactattcattaaatgtttgacacaattggaattgtctttaatttctgtcagaatgctattgaaaatgtgaattgcatgacttgtagcatattcttttctgcaaaatagacatattaacatgcttatgacaatgactgtgctactgtctttggaaaaatgtttgtctcagttggaaataataaaagattcacctgagaccaaaagcttcattgttctcagcttcttttgggcaaagagagaggtgtgtgacttttcaaatctattctttgaagtaaattgcaaaagatggccctaggatttgttgggttttggatgcataatagaataaaaaagcaaaccttttgaagtaatgtgcaggatataaagagaaatagattagaaaaagacatctactcccccatgctgagagagattacaggggcttgaagaacctgtttcaaaaacaatcataagatattactttaaaaattcctttatctaaagagctctacaagtagccagccaaagttcatttttcagggctgagaagaaagcttggataatgggaagaattccggggtgggagtgaaaacatctggattgtcaagacagatccctggcccctcagatcttgtctgatttctactccttaagaagatagaggcagctgggtgcggtggcttacagttgtaatcctagcactttgggaggcccaggcagacagatcacgaggtcaggagtttgagaccagcctggccaacatggtgaaaccccatctctaataaagatacaaaaaaaaaaagctgggcatggtggcgggcacctgtaatcccagctacttgggttgcagtgagcgcagatcaggcattgcactccagcctgggtggcagggcgagactctctcagaaaaaaaaaaaaaaaaaaaaaaaaaatatatatatatatatatatatatatatatatacatatatatatatatatatatagagagagagagagagagagagagagagagaggctaggcatggtggctcacacttgtaatctcagcactttgggaggccaaggcaggtggtttgcttgagctcaggagtttgagaccagcctgggcaacatggcgaaaccccgtctctacaaaaaatttaaaaattagccaggcatggtgttgtgcgcctatagtccctccctactcaggaggccaaggcgggaggatcacttgagccctggaagttgaggctgcattgagccgagatcgtgccactgcactccagcctaggtgacagagtaaggtcctgtctcaaaaagaaaaaaaaaggtagagcttttactctgctgactctgttactaagtagctctgactttgggcaagttacttttcctctctgaacctcaagatcatcaatgaaataagatatttgtctcattgagttgttacaaggatgatagagttgatgcaaaacagagcagtgcctggtgtatatcaacggcataggaagtgttagctgctgccgtaatcattcttgcagcttcttaggacaatacagttggacaattccccttctccctttttttacctgtcatttaattcctcacccttggtggcttctacttggttgatttctactgttttcacagttttggtaaagagttattctctggaaggtggtgcagaagagagtaagaccttctctttactctctgaaggttggataattaagtctatggaataaactgaccgtaggcagattaacaggagaaaaaaacattttaattacatgcataggcccaggagtcccacacaatagaagactcagaagggccagatgattgaagtttttatagcatcctgagctacagaagagaatagggggcttggggttcctgggggacacagttatgggaaggtagcaggaggaattgtatgataaataaaggttgtgttgttatgcagataaaatctctcaggtaatcaaagtgatccagcagccttcttttttttttttttttaaaagcttaatgaaattttattttgaaaatatggcaaaagtctaaggcacttcaaatatttaaatacatgtaggaccaaagtaaatgtgacacagtataaaggaatccataaatacagagaactacactatatttctctagaggcaaatacatagccaattcctctaacacaattcaacctttatcattagatacagaattgtgcaattattaacaaaaatatgataatgttacatgtagttcttcatgtctttaattagtatgaaatataaaagttgaaaatactgtgccaatttcatatactctttttttttaaaaaagtcatatttacatctacctagatgaaaccaaatgaaaatattttcttttgtaagtttcatagtttttgagagttctatctagcccagactgaagttactgatgatcaactttcttactttaaaataatacaagaaaaatcaacaaaactgtgctgggatggaattttggaagagctttctaatggtgccacatttggtaaatataaatatttgtggaaaaattttaaaacgtgatgccaatgagaacctgacacttctctgtggtggtggtctgggagtggagagacggaatagaaggtgcccattcaggtcaggtcaggtcacaattccctatggctgtacataacagagcagagactcaacagcaacacagagtaggttaaagtgcaccgtacgcagacagaagatggccagaaaggaggcatgtgtgcccaggctggcagtctctgcactgtgaaagcttcagtctttagccctgggctttatgcttctgtttgctggtgagctcaggcacaatgcatatacattcagtgtctgtcattccaacaggcacagttggcagcttaatggtggcattaaaatggagggctatttgcatacaatcaatcaaatgaaactctgtggcttcattccaagcctaggggtgcccggagactgagcttttgcaaagctgatgtgggcatacagaagaacagtgatgcccttgtgccccacttccagggcgatcgagagcatggtgctgccatcattgtcctgcaggtggacgttgcagcccagctgggccagcagcagcttgatgatctccatgtgcccgtgcttgctggcacaatgaggaccatggagcccttgtcgtcctggaggttgacctgagccccacaggccggcagaccatacaccatgccgatctgcacagtaactgactgcagcatgagggccatctgccccagctgactggctttgaggctcacctttcagccagagttcttccccaacctgcatgtcctctgcttccgcagctgcgagggccgccagcatgatgaaggtatagccccttgttctggtgatccacgttacacatgtgggtgtccaacagcagcttcacaatctcaaaattggagtgggacatgctgtaatggagggctgtgttgctgttgccatctgccaagttgatgacctagtagagggcatccagggaggtagcctcaaaagcagctctgtagtctcccagggtggctgcaatggctaacttctgactggacacgcagaaccccttgtgctggagggtgttcagacagaacctcatatctttgctggtcacagctttggggtcatttatattatttttcagtaagttgcaagcagacaacattttttcacttaatttatacctccctctgattttcaccttctcaggttcacgttcttgaaactgcatttcatcttccaccctggccaacttgaaaccttcaatgttaatggcatggtgccctttggccattccccaagtgtcttcatcctcgtcttcttcaagaggatactactcaatgacactcaatgacatcacactcgtcatctgactcagaagaagagctttcatctgtgtgaaaatcatcacttgaagttgttgcataacctccattaatgccaacaaactgaagattctttttcatgccatttgaatctttgttaccatctttcttcttcataatgggctccagtgtactttcattgtttgtgcatatggaggccagcggccatctggttgtctgtcaggttcactagagaccatgtcctttcctgagcggggaaggcatcctggctgctgaccagctttccttctgagatccctacctctgagcagccttcttcctgatacagatactttactaatgtagatttcctttctagatgtacatttccttgtaaaaaggacagctttttagagccattcctgtgtctgtagtttctctgaataatcagctcgaaatatgccaaagaggtatatttttgggtggcacattgtggtctcctccagtcatattttgggatggtgtgggccgagccccagcagaggcaaaaataagacttaaaatcacgtaggacttttatccatcaaggaagacctggttctcctcctcttggctaagtcaagaattgcctgtgctacttaaccagattctttttagatgaactctctgtgacatacttttccaggagcattgctgctttgtcatatggggagcccatcagtgctataaatctgatggcaaatttttctaaacctggacacacacttctagaaggtttcttgctatctctctgcctgcatttttttttttttctggccatgggattgtgactgcctgtttgtaaagggcagtgatgggggtgtgaggaggggaaggctgctggaggaggtagctcttatagtggacaaggggggttggtaaatacataccatactagttttctggggctgccataacaaatcaccacaaaacggatggcttaaaacaagagaaatttattctcttacagttttggaggccagaagtccaaaatcaaggtgctggcaaggccatgctcccttcaaagcctgtagaggaggatcattccttgcttcttcctggtttcttgcttcatccttgcttcttcattccttgcttcttccaggccttccttggcttgtggcagcagagctcccactgccacctctgtctgcacatgggcactctctccctgtgagtctgtctgttaacatggtgttcttcatcaggacaccagtcatattgaattaaggacccatcctactccagtatgacctcatcttaactaattacatctgcaaccaccctattttcaagtcaggtcacatttacatgtattaggggttgggacttcaacatgttttttttctggggacacaattcaacccataataaagcaggccagcacccacccccctcaggtggagagacactgaggcacatattctgcactgcctcccagacttcctctgtggatcatgccccaggtgccacagcagtgacctgcccaataatgcagcctttattggctgcctttaccttttccactgcccactggtgaccctgctggtgtttcctgggatcatctctcatataaactgcttgttttcaaatacttgtctcagggtttgctcctgggggaccctgacctaagaaactatccaaagtcaaggcttatattatgccaaatagtatacctgcacttgcaaccccttgtcttaatatatcctgatacaagatactgggaaatgctcagcatgtactcacatgcacagagtacaatgtctcttccttttttcctatcacagcccagcagaaaacaaaatcctttcctaaagagagattcaggggcccaaggtgaaaaatgatttactgtctataggagagaaaataaaacccagcaatacaccaaatgccagcctggcaaatctcacacacacacacacacactcacacactgggcactgctcacgaggaaagctgctggaagctagagtgcaatgcatatggcaccccccagcttccccctggcatctgccttgttgaggttctgcacattagtacatcttttcattttagtttgcaaacaccccaggggagggaaacgtgaaggtgtagatggtctatcaaagatgaaggagacatccaagagaatcccacccaatacgtgctgctcagacggtacaattaggatcttggggatgtcaccatttcttcaggaagaagtgaagaacaatctagtccactgtttttcccacttttaatcaaaataatttatgtccattgtaaaaacattaagtagtcctgaaaggcttataaatgaggattatgggttgaattttgtccccaaaatgaagaagtcttaaccactggcacccatgaatgtgaccttatttggaaatcaggtctccgcagttaagatggggtcattagagtttctagtattattggtgtccttacaagaagacggaaattcagagacaaacacacacacagaggagaataccatgtggagacagaggcagagactggagctatgcctcttcaagccaagaaatgcctgggttaccagatttttctggtacggtcaaggaaggattctgccctagaactgtcagagggaacactgcctctgccaacaattcagtttcagacttctggcctccagatatgcaatagaatacttttctgttgttttaagccactcagcttgtggcacattgttatggcagccctaggtatctaatacaatgagaaacaatggcctcagtgccccatcctccaaatctgtgtgcagatgcagccacctgtaatttaacttttagatttattttcttatttgaatatattgtcatgatttataatatcatgacaagtttatcgagaaggagttataacacagagctgggacaggaggaaagaaagggtcctattattacaaaatgaaaatacacaccatgccactgtaaaacatagtataatcaggaggccgggtgggtggttcacccctgtaatcccagcactttgggaggtcgaggcaggcagatcacctgaggtcgggagttggagatcagcctggtcaacatggtgaaactctactctactaaaaatacaaaaaaatagctgggtgtagtggcagttgcctctaatcccagctactcgggaggctgaggcaggagaatcacttgaacccaggagatggaggttgcagtgagctgagatcgtgccactgcactccagcctaggcaacaagagcgaaactctgtctcaaaacaaacaaacgaacaacaaacacataatataatcaggagatttcaggtgctgaaataattaattaattgcagtaattacaattctgcagtccaggatcctgacactcacatatatgacaggcttcactgagaaagtatctgttgatgaaagacctaaagaaagggtgtgagccatgtggacacctggggcaaggacatttcaggcagagggaatagtaggtgcaaaggccctgggtcaggaatgtgtttggcatgtttgaagaagaacaagaggccagagtgggagactgtcgtaggaggtgagcttagagaggcagcaggggccaggtcacgcagggctctctgtaggtcctggtaaggacttttgttttacaattggagagttctcaacggatgactgataggatttgctttatgtttataacaacactggctgctgggttgagtgatggctgtaggggaagtgaaggcagaaacacagaaaccaataaggagggcactgtaatgaccctggtgggtcattgtgatggcagggtccaaggtggtggcactgggaatggggagaagtggtagaattctagatctattctggagacagagctgacacgtagggctgctggttttggtgtggcatgagggaatgagaggagaataccaaggctttaggcctgagcatctgggaaaacagatggggagactgcaggagggactggtttggaagggtagagatggggagctcagatttgaacttgttaagtttgagacgtgaatagatacccagcagaggtgttgagctgggtatatgagccagtgctggaggaaaaggcctgtgttgaagactgcatgtgggagtcatcatcatagagacggtatttaaagccttaaaactgggtgagatcacctagagttatataaatgagtgaaagatggcctctgtttattggctcatagattgtttatttcttcattgcaggctgacactgattactgcagaagccaaactcaaatttttacacatccaattattttaaacaaattttatgccaatttttagccattcagggccttgctggtacatacccggtgaaactatacccagcatctgttggccattgataacatagagccttgtggttataagaccttaagtgcgatgttaatcccagcactttgggaggccgaggcaggcagatcgcttgagctcaggagttcaagaccagcctgggcaatgtaatgaaaccctgtctctactaaaaatacaaaaattagctatatgtggtggcatgcgcctgtagtcccagctacttgggaggctgaggtgggaggatcacttgagcctgggaggtggaggttgcagtgaactgagatcatgccactgctctccagcctgggtgacagagtgagaccctgtctcagaaaaataaagccaaaaacaaaaacacaaacctcaagccgtccctgtccttcggagctctctgacccagagactcccctctgtactgctgtgcaacaccacctagacacataagccttgtttctgactctcccctccctcgggggtatccttgcctttcctcctctccttctgagtagcaacacctgtagtgtgtgctctttgcacagactcttgctctaagggacatccccctacccctatgcaaacctgtcagagtgtcaccatcaccaataaaatatgtgtgtgctgctgccatctcatggtcatgtctttctctttgatcagtccccaaatcctccaaacaccctagggagttagtgtagacaagaaaaggaagaagtgcaagtgctgagccctgaggcatgccaatgtttagaagtttcagagatgaggaagaaccagtaagagagatacagaaagaaaggctggagaggtaggagggaaaccaggagagagtggtgttctagaagccaagggaggaaaagcctggcaaggagagggatggacggtgtcagacactgctgataggtccagcggaccgagaaggagctctggatgtcacactactgtccattgttgcttgctgcccacaccaaacctgcttcccactgtggctgctccaaagggctgctctcccgtttccaccagtgccacaatccgtctcatcacgccactgaaatcagtgatcagcaaagtttttcacaaaggcccagagagcgtgtattttaggctttgagaccatatgggctctatcacaattattcaactttgccacagtgtgaaagcagccattgacaatacataaacaaattgagagtggctgcgttccaataaaacttcagtttgaatttcatgtaattttcccatgtcacaaatttattttattttttatttttattttttttacttttccgcttcaaccacttaaaaatgtaaaaatctttcgttacaggccatacaaaaaacttgtagtgggccagatttgctgcccgctgatttaaattaatcatattctttcttatttttatctcctttcttgaa[134 bp omitted]agcctcccaactagctgggattacaggtgccgccaccacacccagctaatttttgtatttttagtagagaaggggtttcaccatgttggccaggctggtctcaaactcctgacctcaagtgagccaccctccttggtctcccaaagggctgggattacaggtgtgagccaccaagtctggtctatataattatttaatttaatttaatctagtttatagctcctattttgtgtcactcacaggtgacaggagagcactgagaggtcactacccacctaagcatttgattaaggaaaagtattcccaaaaggcaaaagaatgcctgctatcatttcccctggattaatttctccactctttaaagtttgttggcttagaattataacactatgtagaccaaacatccaacagattgacctacccctctttcaaaacaaaatatccacagcaccttgttacctgtcaaagcaaaaatgaaatgtcaaaatctttccagtcttgttttaatgatatctcagctaagagtaaaaaaaaaaaaaaacaaaaacaaaaaagccccaggttattaatagaactgtaaaaagggccttccaaaaggagtgggtagagtatgatattcatttcctatgcttcaaagatcttgccctttctcataaaaactcagatagctgtgggtgcctagtaaaggttaatacggtagttgaaaggttactggttgctttttaagtagctattcagggacttacctctctcaccatctgacctgtgctacatagttaagttcaaggaaaattataatcctttttacaaaaattaatactagcctagaggcaacatcatatttcaagttattagatacactctgttcctttctagcactgcacttaaaggcattacaaaatcaggataaagtgaatcctgatcatggatttttaggacatgcgttttagtatttagtactgttcttgcaatacttacaaccaacactttaaaacaacatgcaaacactccatttttttttcccaaagcttcactatgtattgagaaaaggctatttttggcttttcaatatacaaccaatgcatgaatgattgctcagtatttgcttcatacaatttgagtgtacctttaagctaaaaaatgccctgtaatgggtgccatgctatattgccaagtaccctagtccagtggaggaacaggatggatgttacagaatgatttttgtctttgacttcttgattgccattcattaaagtgctattctacataactcctctggtggctggatgtccaaaaatcataaaattatccgttcatctgctccaaaggtgaatgtccattttaaacacaagacaaaaacatcctgtatttagctgtacccatgatgtgcatgcacacagtcgtggttcccagtgggcggttcctggaccaacagcaccaatatcacctggaaactacttgaaatgcaaatgctctgtaccactccagaagtactgaaatcttattctgtggggtggagggcccagtggcctctgcttaccaagccctccaggggaatctaagttttccaatgctaagtttgcaaaccacagaattcaatcatctgtacgcagattaagtaaactatatgaatgagaaaaaaaaaaaatacagattaacttatgctgttggcattggtaagatgagttcacaaggtaacatgagcatgcagggccttggtagctcagaccccagaccccttgctcaagaaactcaagagaaaagatttagggaacggaatgcaacttgcaaaccagtaaccaggagaccagccactactgattctaatctatgcagttttctgttctccttgtccaaacttgattagctacatgtgtgtgtgacaccagcttgcaacacactccgtgaggtgccaatccaggcatgtcctctacaatagacagaccacgtcacaatcggccgaaagcccacaggacatcactgactgcatcactgttagaagaatcacagtaggaaacattttcatttttatttattttttgagacagtttcactcgtcgcccaggctggagtgcaatggcgtgatgtcggctcactgcaacctctgcctcccgggttcaagcggttctcctgcctcagcctcccaagtagctgggattacaggcgttagccaccacgcatggctaattttctaatttttagtagagatggggtttcaacatgtttgtcaggctgatcttgaacccctgacctcaggtgatccgcctgcctgggcctcccaaagtgttgggattacaggcatgagccactgtgcccggccgacatttttattctttaatagcaattaggataaaggactcaaaattgtacttagtaatcacattggcatagcacatgctatttggaaaaaaaattttttttctgagatgttccttgctgtatgatacaggcctattctatgacaggagcaacgcaaacgatgaccatgttccagtgagcaagactcaatctctcaaatgaacaagagccttggctgattctaaacactttctttgctacagcacatgatcaaatgattagagtttttcagagcttagaaagggtaaccatctaatcatgacagagttcttcagcattaataatcaagaaaggcactttagggacatttgacaaggaatgacactaatacaatgagaattggtctaagtcctgcacaagactttgatacagttcaaatagactgcacactctttctgtccccatgtgtacatacatattcatacaggtggtacaatctatgtctccacttgcatgtgtatgtatatatctgtgtatatataaatatatgtgtgtatatataccaacatctatatacatatgtgtgtgtgtgcaaatgtgtatccataagaccatagagggggaaaagacatttgtttcctttaattgaatagtacacaaaaattctagtcactttatttagaacaaagaataagagtattggcaaattaatgcaaaaaagtaccctactaaacctttctatgcacaaaaaagagcagtaaaataaatactcagaactttcccaggttgtcaactattaaaataaaacctcagcatttcaaaaaagcttattccgctgcaggaaagaaggtggacatttttggtaccataataaatcacacactcacacatccatattgcttaggttgaagagaacggaatgaacagaggaaatttcttccatgaattgccctcctttcggtacccgccatgttttagttacgttgtattattccacttagcttaaaatataaagtcttgtagaaacacatttttaggatgttgaagttctcaagatatttgcacagaatatttagaagtacttagaggagttttgttaaatgcagttggtcatactacataccccatggttgcagttttgacagaccaaatgcatctgtgtcagaaatagacaaaaggcatatactcctccttcctagaaacgggtacatagacatgttcttattcttgggatatgaaaaaacaagtagtaatggcatttaaagtttaattactaactgtataatgcctgagaacaaaattcagagcaattctcaaaagggttaagagtcagactctgggcattttcgttttttagctgcaggctcctcagtctcgtgtgattctaaagtgcttgcattagatttgaggctggtgtctgctttaaggttgtccatggcaacggtgaagccggagagaagataacccccacctccactcatcagcagtttaggatgacttcgatctggcaaaacctaatcaagacagaaaagacattcatgctttcctaagacaataaagtccatgctaacaacacatataccaaaaatcagaatttaaacaacacaggttctcttgatgatttaaatggacatttttttttctttcttttcttttccctccctccctccctctctcccttccttccttccttcccttccttcctccctcccttccttcctttctctctctctctttctttttaagaggcagggtctcactgttcctcaggctggagtgcagtagtgagattttggctcactgtaacctcgaactcctggcctcaagtgaacctcccactttggctttccaaagtgctgggattacagatacgagccacggcaccaggctttaaatggaccaacttctaaggactaatttcttcacattacaatgcaaagaaaagtgtagaaattggtttaattgattttcttttgaaaaataaaactggccgggaatggtggctcacgcctgtaatcccagcactttgggatgctgaggcaggtggatcacaaggtcaggagtttgagatcagcctggctaacatggtgaaaccccatctctactaaaaatacaaaaattagccaggcgtggtggcacacagctgtaatgccagctactcgggaggctgaggcaggagaattgcttgaacccgggaggcagaggttgcagtgagccaagatcgcgccactgcaccccacctgggcgacagagcgagactctgtctcaaaaatgaaaaaaaaaaaaaaaagagaagaaaaagaactgaagcagttttcagttcagcccaggtttatctagaaactgaagcatgtttctggcggagaatgggtaatggtcttggcagtactctagaactgtgcatatagctttctttctcctggcttcaggaagcttcatggccaataatggagcttgggtctatggagaagttgctactgaatgtactacactccaaacctcccttccccgctaccctgttaactctgccaaggcaacttctctcctctttctcctgtaaccttagccaagacagacaacctccacaaagggcagggttacccaaggctcaatagcatccccactacagtatggtaagacaccaagcaatgagacggggcctacggcagcatggaggtgctcccctcagatctcccttcatgagggaacagctgagaggcattcaggcagtagaacacctccagctgccgctcctttgggatccactgcagcattcataccgagggaggccatgggttgcttccagtcagtaactgagcatgggtaccagagctggagcatttctgcttaacacagggctccttgaatggcgatctttccacttgggctcgccatcagcctcatggagactttctccagagcagcactgcaggctcttcctaccatcctcctttctctacccgctccttgcccaggcatcaacctgcaccaccaatcttgctccctctccccttatctttctaaggcatttccctcaataaatctcttacacttcaacttccatcttagcatatgtcttccagaagacctgaactgacacagagcccaccagtaaatcctgaaaacttgctgcaaaaacatcctggcagagaggaaagggccagtttctcatccacctgggaattttgctattgtcaattacatcatccacagtgatactgaggccttggggaaataagaaccataatggtttgcattttaaatgcctttagggcagagttacagagtaatatattctgacataacaagagaaaaaaagggtcacaaaaagtcaggggcatattctctgagtaacagccatgagaaatctccatccctgtagaaagaaacagagacatctctatttttattttgttttgtttttgagagagggtcttactctgtcacccaggctggagtgcagtggtgggatctcggctcactgcagcctcgacctccagggttcaagcaatctttccacctcagctcctgagtagctgggactacaggcacctgccaccatgctcgactgatttttatattttttgtagatacagggtcatgcccagccaatttatgtatttttttttgtagagacagggtttcaccatgttgcccaagctggtcttgaactcctgggctcaagcgatctgcctgccttggcctcccaaagtgctgggattacaggcataagccactgtgcctggctgagataactctatttaatgacttctagtactactgcaaggaaagtcaagtctcgggagggcagctcttgggactggctgtaagaacacgtacctgataatttctgagccaggtttcagacagcctgaggttgatgacccctcccctctcccgcagttttgtgtagcattccaacagaggctgcagacaacaacagaattctgttaagaactacttcctgggatgcagtttaagaatcaacattcagacataagaattcctgcccattccattccagtattacctctttgtactgacagtagaccacaaacggccttgaaggggccacaaagtccagcaaagacagcagcaggggagtggggtggaaacgactagctacaattaaactgtaaggaaaatgccagacaaattatttctctacaccctcaaagtggagcacaggttttaaaatgcatttaaaatgatcatgtatttaatttgcatgactcacaaagagaagagatttaaatataacattctagaaatccaaaacagaatacaatcatgagctatttctttctaggaaacgcgaactaggttagaagctcttgtggtacttggcaactctaagtcgcatttaatgacattcttgattttttaaaaaaaatcacctggaaacaaatccaacactgcataagctgctttgtggatatctgttatagcctgtatcgcagcatttgagtgccccatcccctgcatccagtgggaccacagggcccatcttgatgcagtgatggagaagattcaatttcttctgaaaccctgaaaccagcatcatcaattccccacccctgccagcctcagcctcctttctttaaaaaaacccccaagacaaaatcctcatctcgggtcccactagagtcaaagcagacaaggagaaagagaatgccaatctgtctgaagcagagcccacatgcactgaggagtctcctgccttcttccatcaacgcacccatctgcgtttctttcactcagcagagcggcagcctctaaatgtcttttcctctgctcttcttgtctcctctgtttttcctgaatcttcaaaaagaaaaataagaaatcaatgtactggggtctttcagtcaaatttatggaaatgctctggcctgtcaaaacatttcaacaatatttatcaacttggactaaaccaatagaagcaggttgtttataaggaagttgcaaatacacaagaaagcctatatactataaaaaccatgattaagctatctatgcaacgcttctgtatcctaaagctccatcccgaagaccgaatcacacgtttgtatacatgtacacacactcgttctctgttttgatagttatcatcttgggagctaatacaccaaagccaaactaaatctcatgacttaactgaagttaactgagggactgagattatgggggtggtggggactcttggcatccttacataatcttttttgcttcctctctctttaggccccttatgttctggatcttgagaaattgtttccattgtttcctggtcttctgggtggttgctctctggggcctctgccatgctgtcttcattctcttgttcagaagcctgtttttcctccagtgtgccattactttcttcaaccaaagcactgtcttttggctctgaagataacatcttggcagaaaatgttccatgtagaagactgtccactttgttgagagggaattcataaagaccactgagaaaagatttgggaaatccaaaacatgctgttgctgcccgaacaggtcctcctccagggtatagctgaataatggagccaaaacctgaacagataaaagaaacaaacatctgcccgtggagtgactctagactacgtaaaccctcagtgagtcctccacagtaatgagactgaaggtctttctattagtactttattcagaggctgaaggatggtgcagctcctcagggagtctgtttggagtctatgagtattaccaatggaggtaatataattctaaagcagatagcaggaagactcaaagaagcttatccccacttgatactattgtaaaaccctgtgtctgcaaatttggatgtcacatgattggtgacggactctgcttcccctcactccgatcctcaaatggagcagttacaagttcttaccttctatggggtcagaaaaaaaccagacaaatcaggctgtgttgtattcttccagagagaatacatgcttagtaatcttcccactcaatcccttcaatttaggcccaatgaaatgagcaccagctacccaggagtttactaaaatcactgtcccgaaagccctagccagccacaggctccagcatcatgcccactgacagtgaagctagaaaggacaattgccatgggtttgggggtacccatgggtggggggctgggtgatggagactgtgtaagaaggtccccatgctaggagccgtgcaggttcacccaagtcactttgttaaccctgaagtaattcaatttggctttccatgagtttacatttttggaccacctttactcacatcagggtggggttttgttgaaaatggaaatattaaatcttacctcccattcgttccatcattgcacccagcaccaagcctgcacacgtttccatcacaatcattttgttgccagcacggatatttcccaacgtcaacatctgggctagtgtatcgtatctcatgtggctaaagtaaaaacaataatttgttcatttttagctaagtaaagcctattattttaatcatcatttttcaagttttgtttgctttattaaaattgtgttgataagattattgattgctttggaggtgacagtaaaaggacttacaatttatgaggtaggaggatactttatgcaggtgagcaagctttttcattttacttaaaatcatgactttcttaaagacatatttcccccaattatacttttgaaaggaaacaaagcgtacttaatttttccaggttctcttgcataatacataattgaaagaatacgggtggatggcttcacaacagtaatgatggcttcatatctgggggaagaaaaaacagaacgctgatttaaaaaaatgacttaaaatattttatttgtaataaaatgtatattttataaacatataagaagtttaatattgtgggccttttaaaataaaaactacttacttttttttcttctttttaatatatttatcttgggcaaattctgtcttgtctcggaatgttgtactattttcaattaactgctgaactatttcctataagaaaaggagcaagtagattttctgaaactttactttcacaaaacaagtaatttccaaaggcttcttacccaagaatggatccaatggtctgattctccaatcccttttccacagaagtccaaatagatgaactttatatttctatactctatttggaatttataataaaatacaagtactttataactccacttaaaccaacgtaaaagaacagagatatccaacaaaaggagaagagaggtaaaggaaactaatttctgaagacactggctgaaaacattactgaaaatgaacaaagttaaatcctgatatgcactgttattacattctctaccactgacattagtaatgtcattcacttatattcctgtatataagacataaaatctttgaaatgttgagtaacatgtacatttcaacctatttctatcaaagctataacgttatttttttgttttaccttaggtacagtctgctttaaaaacccaacagtttcctaaatgccaaacagacaaaaacaaaactaaaaatcctttgaatattacctctcctttaatgcccttgtccttcaaagcttttatgtcatcttgagtaagtttctgagatttcccatcatcaactatatttcgattatcagtgcccgcttctttagtctctaaggaaagaaattgctctattgacatttatggtctgaaattatttgacactttctttttctgagttcatatccacatccagtccatcagccactcaagtctggcctcccagctgcactgcccccatcacactatcctttcctgccaaaactactccaagcctctaagtcatcttcctgctcccagtcttgcccccctactatccacctggatgccagagtgctctttgtttaaatgcaatttgactcatctaccccatgcttaaaaccatacagtggcttcccatagcaataagaatacactccaaagatgacctgcaaggtcataaatgatctggcccctgcctatcattcctggcctgatctcttgacactttagcttcagccacaatggccttctttctgttccttgaacacacccagcaaggtcccacagcaggcttttggcacctgctgcttcctctgcctggaaggttctacgacagatgtctgagtggctggatcctttctatcacttgaggctgagctcattctcttgctttaccaaattagtacacgcccctgctttattatcttcatagcatgtgtcacttcaccatcagaaatcatgctgtttgcttgtctacttgattatttttggtgttccaactggtaagcacattttatacgacagtctatcttatgaactgctataattgcagcgccaaattatacctggcatatatttggtgcttagtaaaaatatggatattaatttaaatgtatctaaataacaggtttgactcaaaactttaacagtatttaacttcaaataattacttgtgttttaattaataagatactctcaatgttcattttaataaatataattttaattaacaataacagcttttggacaagaggttgttaagaaataataatagtaatagctaaaattatgggcccttactaaaagcaagacactattcagaacttcctatgagtcatatcatagaacactcaatacaacctaggcattaaatgtgtttatgaccctattttacatatataaggatataagactcacagaaatcaaataagttgcccaacggtacaaggcaagtgatgaaggtagaaattgaacttagctggatccaaaaccagacctcttaacctctacaccatatgctaaccacctcacagctgttacataacttctgggcactgaaagaactttacattatgttcttgcaatgacgcagcaacgactcataggattaaatgcctggcccaagaacagagaaccatttaatggtgggctggagccagaatccaggttatctcatggccaaaggcagtacttgcttcactccactgagctgcagttcttagattatgagttaagatttcttttgggatagcatggcctagcacttgggaattaggtggaggctgagatgtttctgactagtcagttggagagcatctatttcacgcatccaaaatgtgcacctgcagtaggctcttccctcttcttcttgggctgtagacttcctccactggtcacttcaaatgcagttccataactatggccaatgacgttatccaggtagaaccactgtttttcgaaagttacttttctagggaaaaaaagtaatcaattaactgaatatcttttctatccagtacagaaaagacatgttcactacagtttatttcaaaagtggtctccacaatggatgatcagcagcattatctctgaacataaagcaacaaaggaactagagagaacctggttgggatagagacgtaaaattaatgaataagccacaagaacactgaattttggaaaggggaagcaaagactcatcgaagtaacaaggatttaacaaatttcttgggcttggtctgatcggccattttatttgaaaattatctaataaaagcaaattatacttgcaaataaacactgacaatctacacacttggaaatggagcctaacactgacaatgctctactgaggaccaggcaacttgaggtttcctatgacatagattttttatcttattgcaatttaaaagagaaatcccacaggaacacaatgctttcttctcaaaagaaaactaacatctgctgagtgccaaccaggggctaggcagtgtgtgcgaggtgtgattcacactttttgatttaattctcacggtaatcctgggacatagctctttccagaagagcaatccgaggcccagggagaagtatcttgtccaagattcacagttgcaaggtgttgttggagctgggattcaaattcaaatctgtgtctgaccccaagcctcattctttccactataccacacggtctactccagcaaagacctaaggacggtagaaagcccacctagcttcaggacatggcccatgtgcacagaacactgaattctgggaatcatgtggtggttaattctgattgtgccccatcccactccttctcttcctttctctgtgccaccaggaagctgattacgacagaatatactgccacatcacccacgctcccgtgtcagaggcttaccaccattgctggtctctgggtgtgtcacctttattggttccctaaatcggccacacttttgagtcacatcttcattaaagcttactcaaaccatctgagggaaatcctgtatgatcgtaagtgattcagatatggccaattcttgttatttgctgggtccctagatacttacatacaacagaatgtaacagacactcaaaatatttgctaatgtaaacctcctcagatgttgcaattcagctcagcccagatgtgcaccccctatcctcatcctttaatcacctaggtgctttgaaacactggatctggccaggtgtggtgggtcacacttgtaatcccagaactgtgggaggccaggtgggtcacttgagtccaggagtttgagaccagcctggctgacggggaaaaactccgtctctacaaaaaataaaaaaattagccaggtgtagtggcacacacctgtagtcccagctacttgggaggctgaagcaggagggtcacttgaattcaggagtttctctacaaaaagtacacaaattagttactgaggaggctgaggtggaagattgcttgagcccaagaggcagtggttgcagtgagccaagttcacgccactacactctagcctgggggaccgagtgagatcccgtctcacaaaacaaacaaacagacaaaccaaacaaaaacactggatctgagatgggtgggtttacctctctgagagcctatgtgatatgcagaggggatgatgcgtgtcacttaaaactggctggtttgacaggtcactgccccagtcgggaatgtggggccccgttagagggataaggaggccacatctttactgggaaggagtaggatttgcagagtctacttctcagagagcctggactgttttttgcccaatcagatgagtgtagccccaagggtgatgagggagtctgacctgggatgcagctgagctgagagagtcatttcctaaataaaatggaaactgccactatgacttctgcgaagaagagggcctgttgaaaagtatttccaaataaatgtttagggcagtggtctccaacccttttggcaccacaaaaggggaaggtcaactactgttcatgcctgtaatcccagcactttgggaggctgaggtggccggaattacttgagcccaggaattggagactagcctagacaacatagtgaaactctgtctctgcaaaaaaaattaattagtttaaaaaagaaaaaaaagaagaatttaaaaatggttaaaggttggtgcaggtattacatttccggactaaaagaaacatacccctcataaaagaaactttttatctttactaaattagtgcttgtgcaaaaagcttggttatcaccagcttagtgctctggagacttgtttcttgactattttatgatgcttgcttcaccttaaataccagtcaacagtttgcttaaaccaggagtaaaagaattcatctgaagtaagtacttatcagaaattccaaatctcatacttcccagtctgcagaaagctgttctcctgacattgcattcaacttatctctgtcaaaagtaatacaataacctagctcaaaagaaactgtggccaggtgcggtggctcacacctgtaatcccagcactttgggaggccgaggcgggtggatcacctgaggtcaggagttcgagatcagcctggccaacatggtgaaaccccgtctctactaaaaatacaaaaaaaaaaaaaaaagattagccgagtgtgatggtgccagagtcccagccactagggaggctgaggcaggagaatcgcttgaacctcggaggcagaggctgcaatgagccgagattgcactactgccctaaagcctgggtgacaaagcaagactccgtctcaaaaacaaaaacactgtggttgtatttctcagataaattaatccaaatatcccaataaattttcaccattaataagctcttaggacttaacaacctcaccagcccttccagaaagttatcaaaatcccacttctttacttctataaaacagagcgatactagccagcaggtgcacaaaccaaacctaatttggagttctgaggccttgagcaaattgctttttagcaattttcccagcgttgaatcctttggtgagtaaaacgagggaaactcaaagtgattccacactctgtggtgaattgtctccttcatctattctgtgtatcctgcttgggtagagaagaggatagaaagccagactaggtaggagacgtttcattttttgtgggatagatcctgactgggggattagggaagaaggaggatctatggtggaaaaaaagggggaacctgaaggagactctggagacaaggatgagatcctaaagtgaagaaaggagggggtgtctctggaaagacagtgaagatcccaaggtcctagggaaagaacttcaggacaggtgattagggtgtggagagggaggcattggcaccctagggccaagaatggaattctggggaaggaactctgtggaaagactgaaaaggatgctgaaggtggacggccagatatgaaatcatggagggggctccgggaaaaacaggagggttaagggagattatgaggttcgaagacgggatcctggtggaaaagccttctgtgacagaaagacccgaggagacaacgagggcggggaatggggaccgagagagccaagaatggcaccctggcggaagaattctgtggagaaacctggagggagggggtatctacaaggtgggggcgggagacccctaaaatcagcgatctgacttactttctccgctggacttgtactgctttaaacacatcttcacgtttcagcaccacgaagtcgccgtcgcggatgcggtggtctccgggatgctgtggttgtgggcccggctgctcccctgagccctccatgacgctcagccggtcgccgtgctccacggcgtcccgcccctcctcctcggttgtcgccaccgccagcctcacttcccacaacctggcgcactaggagccctccgaccggcaccgcccccacgtgttgcacgccgcttccgctttccggcccagacctcaagaccgcttccggaagcctctcggcttccgtctggccaaactccttgattggctgcactccgccccgcccctctcgtcttgccgcttctttgagcggaagttggatcactgaagcgccaaaaaagaatttaggggaagacctgattttcgcttgaggcatttttgcggcgctgtgcgctacagacaccttctggaagctgcggtggggaaactgagtttcccgagccgttgagacagatggggttcagcaccgcgcggggacgacaggaaagctgcggctgaagagaactgcggacttggcaggagtcgcctgaggagctaagatcccggagactcttagccccgtggtgcttctctacgggagggagggagggagaatccggccggacagatctgcgcgtatcctggagccggcccagttgtgaactaggagagctttgggacctctgtcccaagcaagtaagaactttagccttaggagatgtaaataaagtagtatttgaagaagcacaggtacccaactgtttctttttactctttctccagtcctacttcttaacgtttttttgaatttgttactgttctcagcatattgtctcgtttgagaagggtatggcacgcagcgttgttgaaggagcgcctcagcttgggaggctgaaagttttatctctgtactgtcgacaaacaactttgatcttgatcggtttgcttaatttctttgagcatcagtttcataatgtgtaatgcctaattattggagccctgtcatgccgttaaatcgtgaactttctagttactatcttgttttattaactaaaccccttttaagtaaggatttgggtagagtatttgataatgaattgcactgcagcgtacaggtatatctttatttacttgtatacttaggatatgaatcatttttaagtagacgtgtattttataagaacagttttggatttacagaaaaactgcacaaaaaatggatgtgacactgcaggattgactgtatgtaagaagctatgatgatgtatccctagtgtctcacaggccagaattatgttcatcctgtcctgccctataataagaagtctcaaatactgcaaataagttttcatagagttaattacctgtcctattttcatttctgtaatggggacttgtaaacaggtacagtacctgtccttatttttaacctgtgagcgtctagtatacgtaaaccatatttaatagttattaaactattatggtataccttaaaaagcgatagagattagaaacttaactgcagaatatttgggtcttgtatcatagctgtacaactttgcaagcctgtttgctactcttgaacctagaatacattaatttttccctttttattaatacatttttaagagcactattttccttacagttttggtgaagacctttttaatatctatcttttaggagagatgaatggagagtatagaggcagaggatttggacgaggaagatttcaaagctggaaaaggggaagaggtggtgggaacttctcaggaaaatggagagaaagagaacacagacctgatctgagtaaaaccacaggaaaacgtacttctggtaggtgaggtcaatgattgttcaatttttttcacttaaggaagcaattcacgtctatcatacaaggcggtttatctcatacttcagtttgtcttttatttcatgctactccttagtaagtatttgaacattgatgtcccagatttttactaaaacccctaatttggatactctattaatgagagtctcatttggaaagagaagcatattggaaaaatgttcactctgtttctactaacctagtattttatttttttcagaacaaaccccacagtttttgctttcaacaaagaccccacagtcaatgcagtcaacattggatcgattcataccatataaaggctggaagctttatttctctgaaggtagggtttaaaaagtacaaaaaagcaccataaatcatattttcttaacttgtctttggatgctacatcttgtattactgtaattcatttactaacatatacctgctttaatcttagttcacccaaacaattaaatgatgtttatgtttcaaaagcattttagactttatatcagtcaggaaagcagaaaccatactaggtatttcaaaaaggggacttaatacaagaaattggatacaaaaatggaagactgaaagagcagaaaggaaatattgaggtaactccccagaaagtagtaattcaggaagcagcaaccatccttatggctaagagactaaaagaagttctgaggttaccagaatgtgggaattcaaaggttggagaggtcacagcatagctgttattttgacttttgaggggcaccctacaaagctatgcttggacttctgaaggctaccttacagagctgtgcttagaccactaaggcaaatgaagctggttgccactggtaactgagggggcatgactcagtggtgcttggaactggaggctagcactatcgttatcttctgcagctgcagagatgctgaaaagagttggaaacaagaataaattcctttctcttcctgccaccttcccgtctctaaagtgccttcaattggcagaatttaaagagaatctgagacatgtagggtacagatctgaattatagcatcgcagagcaggaagtagaacagtgggcctgaaatcaagggacaataacaaatacagctttgtgtagaaacacaggtaaggaatctccctttgataattaggaataccaattaacctacatcagtctgtataggtgcagggaactgtcttttttgtgctgttaaaatacccatttgtttcttatgtctcatgaggggtgtgtgtgtgtgtgtgtgtgtgtgtgtgtgtgcatactttttatttttttttgagatggagtcttgctctgttgcccaggctgaagtgcagtggcgcgatcttggctcactgcaagctctgcctcccaggttcacgccattctcctgcctcagcctcccgagtagctgggactacaggcacccgccaccacgcccggctaattttttctgtttttagtagagacggggtttcaccgtgttagctaggatggtcttgatctcctgacctcgttatccgcccgcctcggcctcccaaagtgctaggattccagacgtgagccaccgcacccagccgcatactttttttttttaggaaaactagacgtttgaggtccaggaccctccctgccccataccaggcatgcagtagtcattttgtgaatgaatagagtactttacaaatgttttctttattggaaatctgttcgtttttttccatcaatagaatctgtttcatgaatgatcttttgttcctttaggatgtattagccaccagcactcccattgctcccctagcagatagctcagaacactataagtgatctttggacagtcctaaagatggagttcaagaggtgccttagccttcaccatctgtgcttccaaactactttattgtactgttcttctgtgagagacatatttgaaaatgtagaactttagagtgttaaaaaaaaaaaggcttttcagttttgccaccagggtcaagtgttggtctgtctcctgatctcaggaaagactgtgattgtgattgtcttcagctctgtcagagtaagagcttagtttatgtgtctggctttggctttattataatttttagtttaagcttattgtctaaattatctgaactaacatgtcctattaggtgtcaaagatgcaaaacaaagtttcccagatagtggggcttttagagagagagagtttctgtctgcatttcacattatgcaaacctaaatttgttttagaatcttaagtttacattctatactagttcttatatgaatgtaatcaaaatacaaagcaattagaaaaaaatcatctaccatgtatatagtgctgcttttgtctcatgaaaaatgtgcatgtacctgtgtgattatttgtgctaatgccatatttgttggattagtttacagcgatagctctcctttgattgagaagattcaagcatttgaaaaatttttcacaaggcatattgatttgtatgacaaggtaagattcctctacagcaaagctaccagtcatgtgccatcttaccaatgtattcgaggtacttgtgattatgatcgtaggcactggagtcagacttccttggttcagacctcagttctgccacttacctgcagtatggactttgattaattacttctctgtgcctcagttttctttcatttggagatagaggtataaatacctacctcaaaggattgttaagaggcagtaatacattaatatatttaaaatatcagaaccatgcttggcacaaagcttatacttatgtcatacttaccattatcacatataaacattgtatgctttctcaaagtctataatagaatgctcagttaatggtaattgactacagaaaagcaattattgttttcatacttttatattttataggatgaaatagaaagaaagggaagtattttggtagattttaaagaactgacagaaggtggtgaagtaactaacttgataccagatatagcaactgaactaagagatgcacctgagaaaaccttggcttgcatgggtttggcaatacatcaggtaactatttgtcttatgcatacttttgtctaaacttttttaatgtttgcacacacatgcacaccttgtctaagtttaaaggaagattttacagtgactgtactttctataagagatacttagcttttacgaaaagatgttggctagaactgagaggttgcagttccgttctgaaagataccattcattctatatacaacagcttatctaaatgaaatatttacctccaacttatttggatttgcttaatcttgctaaagattgtgcagaaattaaactttgctttcaagaagttatacaatctcatagggaagataaaacaaggaatcatggtgttatcggttatgaacttagagcaaaaaagagcaaccttagatttaggttctgtggcatgaagcaaaccactgagtgtccctgtatatcaaatgtaaataacagtttgtactgtgcttgcctgagttttttttcagggtcaggtaatacaacatatatgaaaacatttttaactttttaaattttttaaatttattttttatttatttttttgagatggagtttcactttgttgccaggctggagtgcagtgtcatgatctccgctcactgcaacctctgcctcccgggttcaagtgattctcttgcctcagcctcccgagtggctgggtgcaccaccatgcccagctaagttttggagttttagtagagacggggtttcacgatgttggccaggatggtcttgatctcttgatcttgtgatccgcctgccttggcttcctaaagtgctaggattacaggcatgagccaccttgcccggccaaaaacattttttaggctagcaaacagatacatgcttcaaggtaatgaatagcaaatctcaggacaggcatacacaaagtgctggggcattcagaggggcattcttctacctcttgcctgtgctgtccattcaacatagaatccccttcccttcacatggacagattatttgggcctagctcagttgtctgtctgtaaaacctttctcatgaccacttttcgaaacttgcatggtattttgtctgtacatctttatggtccttatgacaattacagctgtatatatgcatcttattttgcctcttaggttgccagcaaactgctgtgtacaagtggtattaaatgtttgtttgttgtttatttatttatttattttgaaatggagttttgctcttgttgcccaggctggagtgcaatggtgtgatcttgcctcattgcagcctcagcctcccaagtagctgggattataggcatgcactgccacacttggctaatttttgtatttttagtagagatggggtttcaccatgttggtcgggctggtctcaaactcctgacctcaggggatccacccactttggcctcccaaagtgctgggataacaggtgtgagccactgcgcccagcgtgtttatattatttaatgttaaatgccaagggagtgagtattaggtattttaaaggtcatttttattttctgtgtcttgattggtcagtgaatatagagaaataggaatgcatttttttttttttaattagtatcaagaggtgatggttttggggactaatgtaagggcttttaatgttaggtttagttgggacagaaagtagcagactgggatgctggagtttttcagcacagggacagcaaaatccaatgtaaaacatccactataaagtaagtagtcataattaaatattagatatttaaagggctgttaaagttttctgtttttattctgtttctgtccataaactttatattctctataaaaatagagttctgtataaagaggatgttttgttttccaacttcagagtaaatgtctgtcctgtttaggtgttaactaaggaccttgaaaggcatgcagctgagttacaagcccaggaaggattgtctaatgatggagaaacaatggtaaatgtgccacatattcatgcaaggtgaggaatttgatgtattaaagtattacttagaatgggacattgaaggccatttaagaatgaaaacgctcattttataaaaatgaggaaatcagtaaaaaggacatgagttccttgccatctcattgatcatcacactgaaataaactcattgaaaattattcaaagacatcatgacagatacttcctaaataaggaagaaaatgttgatttcctaacctgcagatttttgtaaacattggttttggatgtgaacttatcaagaccctgctgtgtaagtttaataatccatgtatgggttgagtatccctaatctgaaaatctgaaatctgaaatgctccaaaattcaaaactttgagccctgacacgacactgaaaggaaatgttcattggagcacttcagatttttgaattagagatactcaactagtaatattgcaaatatttggaagtccaaaaattccaaaatacttctggtcccaggcattttggataagggatatactcagtctgtaatacactaagtgttctttgttaaattattaggtttttgttagatacaagggaataatgaaattattttgtttttcttgaattcatctttaagattttaaattcattagaagaattcattataaggtaatcatcagcattttgtttttcttttccagaatttatagaagaaaatttcctagcagttctttaaaaagaacttagaaacccaaaggtttttgaatctgtagattttccttttggcattatttttttccttaaatttcttttttcttttttccttgagaacagcctgtgagacaagaagaaaaaggaagatttagtgttgtttcttgttaagaatggtttggctgggcacggtggctcatgcctgtaatcccagcactgggagtccgaggcaggcggatcacgaggtcaagcgatcgagaccatcctggccaacatggtgaaaccctgtctctactaaaaatacaaaaattagctgggtgtggtggcacacacctgtagtcccagctactcgggagactgaggcaggagaatcacttgaacccgggaggcagtggttgcagtgagccaagatggcacccctgcactccagcctggcaacagagcgagactccatctcaagaaaacaaaacacaacaagaatggtttaattcttgtgatatttctgatatatcgaagggatgatttgatttgagaattccatagttgctcctaaaaggaacttgtgaaaatataaaaaacatcaattttctgttcattacttcctgttttgtctttagggtgtacaactatgagcctttgacacagctcaagaatgtcagagcaaattactatggaaaatacattgctctaagagggacagtggttcgtgtcagtaatataaagcctctttgcaccaagatggcttttctttgtgctgcatgtggagaaattcagagctttcctcttccagatggaaaatacagtcttcccacaaaggtaatacgttctttaactgcttctttatttatcttggtaaagaaggcaaatcagaatacagaaaacatttcccagtgtttctgaacacagagcttatttttattttttattttcaattttctgcttttatattatgaaatacttcagggtaagaaaaatacagaaataaataaaacattccactactcatcaccccgaatttacatttttcagctccggacacattttttaatgatataaagcattactggcacaattagtgtctgttttttacctataccattcccagggatgatcattatcctgaagttattataatatgcatcccttccattcatatttctgttgacttctaggtatacacaccaagttttttttcccctttatttcttctactatttagaagtgatgggttttttaaatctttattagcctttattaaactggattttaaaactatagaaaagtgcagagaataatgtaattaacatttatctactctatgatttggcaaatattaatattattttagcttaatttgtaacaaaaatatggttatataaagttgaagtctttctgttctcagttttattccctttatttgctccctagatgcaaccactatgctgaaattggcatgtattcttcaagtttacatttttattcttgactacatgtgtagagttagttttttgtattgtgtttacgtaaatggtatcctgaatgtaacacgcagctgtttttttatttggttattttgtagttctacctattttaatacatatcaaattctttcatttttactattgtggagtgttgctttaaataaatagccacaatttatccattttcctggaggtagacaattgtgctctttccagttttttataagaacaaatgatactgcagagaacattcttgtacatgtctccttagcagaggaatactaagttgtaggctgtacttttttttttttttttttttttttttgagacggagtctcgctctgttgcccgggctggagtgcagtggcgcgatcttggctcaccgcaacctccgcctcctgggttcaagcagttctcctgcctcagcctctcgagtagctgggactacaggcacgcgccaccatgcctggctaatttttgtatttttggtagagacaaggtttcactatgttggccaggctgttctcaaactcctgacctggtgatccgcctgcctcagcctcccagagtgctgggattggccggctgtacttatttttaactgtattagatgttaccaaattactttccagagtattgttcccaacttaaatctttgctggtagtgttaagtagttaccatttctctgtcttttcattaacacttggtattgttagacttgtacatttttgacagtttgttaggtataaataatactgcatttataatgtgaatttttctgatttctgttgtggttgagcatcttttcatatctttactggccattcagtttctttatcgaattttctatttatatctaatgttcattttcctgtttattggtttattctttaattttgttttttagagatggggtctcattctgttgcccaggctggagtgtagtgacatgatcatagctcattacaaccttgaactcctgggctcaggtgatcttcccatctcagcttcccacgtagttgggactacaggtgccagccactgtgcctggttctattagtttattgataggagttctttatacattctagatactaattattgttgattatatacattagatattttctcccagtctttggtttgtcttttaactttgtgggtttttttgttgtacagttttacattttgacatgatcaaattgttgtcttttcctccctaatttgtatattttatgccctgcttaagaagccgttcttcggctgggcttggtggctcatgcctgtaatctcagcactttgggaggccgaggcgggcagatcacctgaggtcaggagttgaagaccagcctgaccaacagggagagaccccatctctactaaaaattctaaattagccagacgtggtggcacatgcctgtaatccaagctactcgggaggctgaggccggagaatcgcttgaacccaagaggcagaggttgcagtgagccgagatcacgccattgcactccagcttgggcagtaagagcgaaactccgcctcaaaaaatacataaataaataagaagcccttttcactcaagcattataaacatatttcctacattgcttctaagaatcctaagttttgttttttatctttagatcttttgtccatctggaatttaagccattggtgaagggcataaaactagggatttaagctgggcatggtggcatatgcctgtagtcccaactactcagtagtctgaggcaggaggatcgcttgagccctggagtttgagactagcctgggcagcatagtgagacccccatctcttaaaaaaacaaactagtgatctaatttttaggtgaaaagctatttatcctgacaccatttattaattaagcccttgttaccatggatgtataatgtttcctcggtggtacccagagtcatcgttatcaccattgggctttactaaatttaacatttgctaaatttttgctcatgtgaagggttgaatccttagtgaggtaaatagtcccttgaagaattaaaaagggaaacataagatgtttatgtttgaaattcctaaggcttctttctctgactggaagaagagggtatgtgagattcagctattggttctgaataatcagtggtgttgatagatgggtttcatctggtgtttgtcttggcttaaggttcaaggtataacctttagcttagaggccagaatttaaatcctgatttaaaccagatattttcttccttttattttgaagacggggtctcactctgtcacccaggctggagtgcaggggcatgaatacagctcactgcagccttgacctccttaaatcagatattttctagacagtatttgttcagggtattttcatgccccctaataaattaggtagtagcattgactcatgtgtgatgtcgtgaagaggtcctccatttgtctgaactgtggggctttgaagtgacagaaagatggctgtttcagttgatctctattcccgccactattgttgcgtaacacatcactccaaaactcagtggccgaaaataaagccaatcattttattagttctcatgatatctgtggatcaggagtttggaagaactactcaactggctagttctggctccaggcctctcatggagttgtagtcagatggtggctggagtacagcaaggtggctgggggctggccaggcatcttcttctccatgtggctgtgtgggctagtttgggcttcttgcacacagtatagcagctcaggcactcagtctgcttatatggctgctgacaggttcaggtcaagaagtgcagttggtaggcagaaatggccttgccttttgtgagctagtctcagaagtcgtgcaacatcactgtgtcacattctgttggtaacaaagtgagtcccaggccttctcaaattccaggagaaggaattagccttcatttctttttttttttttttttttttttttttttttttgagacggagtctcgctctgtcgcccaggccggactgcggactgcagtggcgcaatctcggctcactgcaagctccgcttcccgggttcacgccattctcctgcctcagcctcccgagtagctgggactacaggcgcccgccaccgcgcccggctaattttttgtatttttagtagagacggggtttcaccttgttagccaggatggtctcgatctcccgacctcatgatccacccgcctcggcctcccaaagtgctgggattacaggcgtgagccaccgcgcccggccttcatttcttaatggaggagtagcaaggttctaaaaagtcttgaagataaatattgttgcaatcatatttggcaaatacagtctgccacagtctgaatttataaatgcttcttgagatccaaacaccaaacaagtgcctgtgtggcataataagtattacactctacagaaagtgcaaaaggagcctagatgagaaagctggggattaaagaaaactctggaaagccttttgaaaaggagaggattggcattgggcatgtgggacagaatgagagggttgttgaaggagcgagaggtggcatgggcacagaggaagcaataagtgcttcatgtgggaggcaagcaaagcaccttgcatacccatagcaggatacgaacagtaagtgagaaggatcaattggaaagtgcctcaaaagctgtcgatattaaattgttgcaggaggaaatagaaagtcattaatctctcagtggattttactttactagcatcctgagaccaacttttaaaacaatattaaatgaaatgttttaactgaattttcctgaggtgtgattatagtttatcaaaatctgaatgtgaattacttttgtttcattcagtgtcctgtgcctgtgtgtcgaggcaggtcatttactgctctccgcagctctcctctcacagttacgatggactggcagtcaatcaagtaagcgatcagactgttacataaaaggcaggctttagatgtcacactgttgagaaaatccataattttactgtattatattgtacgttttatctaaatgacaaagtgtataatagtgtataatagatggtttatttgatgaagagtttgtatgttaaaataattctttttttttttttttttttttgagacggagtcttgctctgtcacccaggctgcagtgcagtggcgcgatcttggctcactgcaagctctccctctgggttcatgccactctcctgcctcagcctcctgagtagctgggactacaggcgcccaccacaatgcctggctaatttttttgtatttttagtagaggtttagtttagaggtttcaccgtgttagccaggatggtcttgatttcctgacctcgtgatctgcccgcctcagcctcccaaagtgctgggattacaggcgtgagccaccgctcctagcctaattgtctttatttgaaatttattctctgtcagattccagaaaggattcattatgcaaatattgtgtcctaatgagaaatagttgattttatatctcaattatgtgattaattgaactggatataggccataagcaaagctgtgtgcttcattccatattgagctgtgatagaaataatattgttttgaagttttcaaataaagactccctttgaaatggcatgtttcattttatgttctcaatgttgcaatggggcattttactatagggttttttaatagctttttttttttttttttgcaagtcagagttttctttgtgtatgtgtttttcatcccataattgattacattttttctagctgtagatctatagctcatccctaaatataaaataatgaatggttttgaagtcagtgctctctagcaaacctggctgaaatgagatggtcctaagaactaagaacctagggaaaagataagatgatctgctgctaactgcttcacccccttcttccctgaaaaattaagaccaacatatataataattaattgtactatagtgagatctttacaaacaccccattttataaaagaggaaatggttaagactcttgagtatgatcgtgtggcctatgagtatggtagagcctgatttccaacctagtctgtgggacttttaccacttaagagggacaaagggttagtctggaggtagtaagttatttcagttgattattcacagtcacttacagatcaaacttcttgttctactctttcctcccttctcactactgcacttgactcatcttaaaaaagtgggtgtggggggtgaattgattgtgaagtggtgagtgatcttggagcaaggtttgaagtcgtgcaggttaggtggatgccagcgcctggcccatgacctgaaaaacattgagaggtagtctagatgtatgatgaatgtattccaaagttattattttaatgttcaatgattgtacttacattaattaagtaaaaaaagctttaataacatgtgcatgtttttaaaaattcaatcagtgtggaaaggcacagtccccacaacttgctgttacattatacataactttagataccattcttgtgtctttcatccttcgctttactgcagtcattctatgtgagctgaggacattagaaacatacttgttcttttatcttctagactttctccgttccgacattactttaaattgtcaaggtttaccttttgtcttctaattataattgtcttccagagtttatttataggtcatgtctaacaaaaacaataaacaggcatttacatttttatgttaataaaaatgcccgatatggcattccccgggataaataatatgagcttctgacttctccctccatcttttctactcctacttgcgtcttcagtggtcgaagccagtgctggaactggctggacagtttatccccccttagcaaaaaacctagcacatgcacaagcctctgtggatctgaccatcttcacgttccactgtctcttccattttaggggccattaactttattaccagaataattaacataaaacctccagctttgtcccaatatcaaacaccccttttcgtctggtaagtccttattatggcggtccttctactcctttcccttcccattttattaacataaaaatgtaaatatagctcaacaaagaaccaaatgaatgatcaaatgccaagcaaaggagctgtaatttatgtcactgggttttgttttgttggtttttaccccttaaatgaaaatgactcaagcatcaaattatcttttcttatactctgctagttatttggaattatcccacattttagtgtgcatcatatttggactgtaactttgtcatttagtactttatttttcctaaggtttctaagtgctggttttacttcttagagtatgcctgtaccatttcaccataattttccattctctcttcaatatactatggaatacatggaatccaccttttattcttaaaaaacaaaaacaaaaaaacacaccttccttctgcttgagtctggatcagtagttctccagacctgcattcctgcttcatcctgggatcttgcttcattgcattttttctaaggaatattcccaagtaaattttcagaaagtatacaggacaggtaaaaagttctaagcccttgcatgtctgaaaatgtctttatttggatcttagtctggctaagagtttgctagctattgaagtctatttggttttaattttctctgctgtttatgagaggtctggtgctcatctgattctcattcctttgaggactggacttttcctcctctttgtaaccattttatctatcatgctgtgaaacagtgaaagtgtatctagttgtctctatcctgcttgattggcaggatcttttgtcttcaactctagaatatctgactgatttctcagcttcctatcagatgcattgcttggattatttgttttaagtttttcctcattctttcattttctttgttctgttttctagatttctttggctttttcttatatcttctctataaatgcttgatttttatatacatgctttaaattttcttgattttgtacttgtttccccattgttccctttttgtagtggcttattcctgttttatcatggcaatattttctcaaaactcttaggcagtttgtttttaatactccctgaattattgccatttaattttcaaatgtctgatgaggaatgagaaagtatttgaagtaggtaggataggtttcctttgcaattttttaggtagtagttttttctcacaagactttacctctaaatacaaagataggggtttgggctatcagattttgctttatgaatgtgtttttgaattggaattgggtttctcagatggtagaatgaagagtctttattctgaagctctgatattctcactgcacagtttagctcccttcacagaggggatgggtttgtttccttagaacagtgctctggtttttgccagatgataaagtacgcattcttcccctacccacctgtccactcaccttctccaaaaattctcaacagctattccatgacttgtctttcggttgattactgttttcttccagccatctactcctgctctctattcctgccacatccaacttggaagcttctctggggctctgctaagaacgttgggtcccactttgcttgtacgcttatagcttttgcccatgtgtattctggactttattttgttttatccatcaatactttaccatttgctggtttcaaaaatttcattaatatctcatttgctgatgatacctctacatacccccaaatttttagtgactcattttggtggacattttggagggaggctaggcaaatacatatgttcatttggctatcttgaattggaaactgctgaagtaattttagatataccattaaactgttaataagcaaatctgcttttatcttcctcagcatcatgtgaaccctgaatagttaatatcttgcagaaaccatccaaagtaagtattctaactgaaaactatttaaactttttagaatccaggaattgatgtctgatgatcagagagaagcaggtcggattccacgaacaatagaatgtgagcttgttcatgatcttgtggatagctgtgtcccgggagacacagtgactattactggaattgtcaaagtctcaaatgcggaagaaggtagggtacaactcttttcattatttgtctctcaataatgattcatcaacgttcatcttttctaagatgctcctgaacctcaaataatttgaggaatttcttgttgcttacataagatgaaacattcccttttaaaaaaacatgtatttgtagctccctatgactttgttttatattctagttgagtcattgtagggaaaatgaaaataccaactattgtatttaacacttttaatttacaggttctcgaaataagaatgacaagtgtatgttccttttgtatattgaagcaaattctattagtaatagcaaaggacagaaaacaaagagttctgaggatgggtgtaagcatggaatgttgatggagttctcacttaaagacctttatgccatccaagagattcaagctgaagaaaacctgtttaaactcattgtcaagtatgtatgctgtcatttgaaattttattacatagatgcatgttgggggttctcttggctacaggtaacaaaaaactagtcaaaatggtcggcaaactacagtccatgtaccaaatacagtactccatccccttgagtatggcctatgaactaagaatggtttttatattttttaatggttgaaataaattaaaagaatatttcacaacacatgaacttatatgaaattcagatttcaactggatatggtggctcacgcctgtaatcccagcactttgggaggccgaggcaggcggatcacttgaggtcgggagttcgagaccagcctggccaacatggtgaaaccctgtctctactaaaaatacaaaaattggccgggcttggtggcgggcgcctgtaatcctagctactcgggaggctgaagtgaagaatcacttgaacccgggagatggagattgcagtgagccaagatcgtgccattgcactccagcctgggcaacaagagtgaaactctgtctttaaaaaaaaaaaaattctgatttcagtgtccataaataaagttctattggaacatagccacactcattcatttacataagtgtgctgcttttgtgctacagtggcagagttgaatagttgtgacagagaacatatatatggctcacatatttttgctttatccttttatagaaaaaatttgctgatctctagtttaaacaatacagaatatttactatcttatacaagaagtttgtcactcaacggaagagtgagggaacagtgaattccaaagccatttcaattagttctgtgtagggtgttgctcatagagattcaaatcgaattaacatatattcaaaaagtatttgataattttatttccatgctattgccatgccgtggagaagcagcaaagtataggcattttttgctttagtggttaagagcttttctttggagacaaacctaagttagactcctgctttgggcatttacttccagtgtgatctgggacatattacttaatttcccctttatttgtatcaccttaaaatggaaataataagacttacctcagaaggttgttctaaagattaagtgggattttataatgtacttaacataactactgcaacatactgttacttttgataattttttgacaactgtggggtaattttgaagaaataggagaaaatgagagagactgaataatagatatatctaagagaggtaaagaactgagaacgttttgaaatgcattgtattataaaaagtgatcttggccaggcacagtggctcaagcccgtaatcccagcactttgggaggccgaggcgggtggatcacctgaggtcaggagttcgagaccaaccggaccaatatggtgaaaccctgtctctactaaaaatagaaaaattagctgggcatgatggcaggtgcctgtaatcctagcttcctgggtggctgagacaggagaatctcttgaacctgggaggcggaggttgcagtgatctgaaatcgcgccactgcactccagcctgagcaacagagcaagactctgtctcacaaaaaaaaaaaaaaaaagtgattttgtcatgcttttctgttcagtaggctcaggtctgtaagaggatttgatgctttttctttctggctttaatatgttaattagctgactgagtaaagaatagtgctccacaggggttttttgtccttaaatcctacttccctctgaataaaagccattcagacccaccctggaagagaggctgctctaacttagcgttgctggggtggtcttggagtgagtcctttgagcaggtggccaaggaagcaacctggtcgacaatccaaacatctttggttcctcttaacagttgtaaattaaaactgaacatttttagtggtccctcttctcccatacttatagaagagtaagtatggaaaactttagttttcttcccacagtttgctttttccccctccatgtttgtgatttcagcatcaaaactagaatttttcatggtcctctattatcagtctagcagagattggcaaactaggcaggctgcctgtttttgtaagtcaaattttattaaaacacagccccacccagtttacttacattactgttcacagttgcttgcacactacaagttgaatagttgtgactgagacagtatagcctgtgaagctgaaaatactttctggccctttaagaaaaagtttgtcaacccagcctaggtgacagtagaagtttatgttttagtttaggttccttcagaagcaatgatttggatcaacatagtttacttgggaggtgattctggagttactggtagggaaatgatggcagccagtgtaggtgccttaacgaacaggtgacccactagcatctgggacataatcctcctgggccagtggaaaactccactgtggaaagccagcttcagtatttttccatttaagggcctacatttgggactgcccccaggagtattaaacacctcagcacttctggcctgcccatcctgcctgccaatgatgcttgtgtggccatagaaaggtctttggcagacaggtgcagatgccagtaggaagccggaacatactgaacagtgagtgccaaggggatatgagcacaccaccacctccttctgtgtttacatatattaaaagggaataaagactcatgttttactcctgattttctctcccaccctatttttgtttgttccttgtttataaaattgacaaatgtaaatgtactgttttatattctttctcttaattttttttagagacagggtcttgctgtgttgcccaggctggattgccgtggcacaatcagagctcactgtagcttcaaactcctggccttaagttattctcccacctcagcctcacaagtagctaggactaaaggtgtatgccaccatggctggctaatttttaatttttttttttatagatatcggggtctcactttgttgcacaggctagttttgaacttttgggctgaagcagttcttccaccttggcctcccagagtgcttgctgggattacaggcatgaacctgtaaaccaaaaataaaattccaaggccccccacccatttaaacagacttccttctcagccagggctcttaagatttaacctgaaagactgattcaggccacaaagggaagtgggggtcagacatgccttattatacctctctggcattaacatcaacacagattttaagtctaataagaaacattttacagcctgttctctctgaaacctgttagccaaagcttcatctgcatgataaaactttggtctctacaacctcttgcatcccaaacattcctttctattgatcccaggtctttagacaaactcaaccaattgtcaaccagaaaatgtttagatttacctgtaggctggaagcccatgctttgagttatcccacctttctggactttctggttctacaaatcactgcacctggcctcattttcttatttaatttgaccttttgacttgaactgaaaaaaatgaaattttatcccatcttagagtattatatactgagttcacttctcagtctcctttcagtgacttggctgcacagtctcaagatgtctgttcacataaaatacaatataatcccgtatcctaaaatggaagaccatgattgtgacgcattttaaggctagttgtgtaagaagagcaacattgtatttagttactttaagatgctttgcaagtatcctctgttccttatgcagagtttttaaaaaattctaacctttatagattaaccaagaactttgagaaatgtactgtaagaataaaatttcagttgaggggatgtaaattttttacatttgtctttgttgatattaagcaggttaaacaaattgtagaggagatctcctaatggatcaatgaagtataaattagaatttataagttgtgttctgtttttcagctcgctttgccctgtcatttttggtcatgaagtaagtattttacttcatctttactcaaaaagtatataaggttagcaaaaataacatataaaaactttacagaaagtagcaaatttctattggccagttatttatatcttaatatgctttgtaaattaatgatatgggaggcaagcaaactatagcttttttttttttaatttttttaattttttgagacagggttttgctctgtcacccaggctagagtgtgatggcacagtcatggctcactgcaacctccagctttggggctcaggtcatcctcctgacctcagcctcctgagtagctggaactacaggcatgcaccaccatgtgcagctaatttttttgtattttttgtagagatggggttttgccatgttgcccacgctggtctgtaagtcctggcctcaagtgatccacccaatttagcctccaaagtgctgggattataggtgtcagccgtatagctccttttaagaaaaaacttttaccaactagagtaaatatgaatgggcttttattttatttatttatttttttgagatggagtcttgctctgtcgcccaggctagagtacagtggtgcgatctcagctcactgcaacctccacctcccaagttcaaacagttctcccacctcagcctgccgagtagctgggactacaggcatgcgccaccagacccagctacttttggtaagaaatgggcttttaaagtgactagacactgccagtattaaagcaaaaacaaatatttctcgtttttgtggaatggatttatgccttgcaaggtagctcttagtaatttctaagatagctctgattttatatgttttcaagtttttactttttaatcatttacgtgatagaagtttgtttttagacttccttttcttagaaaaaaattatcatgcttttaaaacaatccccaaacaaattaatattatagaaggaggaataccccctttactagtcacctttatgttttccttacttctgttttttgttcttttttcgcacttgagcttgttaaagcaggtttggcattagcactctttggaggaagccagaaatacgcagatgacaaaaacagaattccaattcggggagacccccacatccttgttgttggagatccaggcctaggaaaaagtcaaatgctacaggtagacaatcagtcatttagtgtttgttcttttgcttgtaaaatgcgttaataattcacaagtgaattttctcaaagcatgtagtgtgtgtgttccagaggacatggttaggtggcgtaaatgaattggaatttgtgtgagtaatatgtaacttatatctgaccatatttttaaattgagccagtctcctgttacagaggctgtacaaacatcttggtctgttgagacatcaactattaggaaatattaaccatttctctaaccattgttttgctagtctttgttgttgttagttgttatgtgacctcacctatgaacagaatagttcaggggagttaaagcagggtcacctattctccctcatacaagtacataaacactgtattgggctttaagaacagtctgctaaaggtgtgggatctgtctgtatatatctccactgcttgtgagtccaaatcaaggcaacctttttttttgagacggagtcacactctgttgcccaggctggagtgcagtggcatgatctgggctcactgcaacctctgcctcccacttttaagcaatccctgtgcctcagcctcctgagtagctgggattataggtgcgcaccaccacgcccagctaatttttgtatttttagtagagacagggttttgctgtgttggccaggctggtcttgaactcttggcctcaagtgatccacccaccttaacctcccaaagtgctgggattaccggtgtgagccaccacgctctgtccaaagcaaggcaactgctgtgatcagtcatttgtagatccccaagaaaattctgcctctgccagtcagagcctagtggttttcctttcctgggttttatgatggctttagaaggtgctgcttattggtatgcttgtagtttccttaaagtgacaaccggtaagccagccgtaatgtgctttctactttatttttttgagacaaggtcttcctcttttgcccagactgaagtacagtggcgcaactttggcttactgcagcttccaccttgggctcaggcaattcttccaactcagcctctcaagtagctgggactatagacatgtgccaccatgcctggctaatgctttttttgtagagatggggttttgccatgttgcccaggctggtctcgaactcctgggctcaagcagatccacctgccttagccttccaaagtgctgggattaaaggtgtgaaccactgtgcttggccactgtgctttctaaaaatgcctgtggcccccttcttcactcgatgtggaaaattgaccagggcttctctggccctttagtaagttgtagtagtatggctcctaaatctttttccaaggattgggatcctggctgcacatcttaattacttttggagctctttgaaaataccatagcccactgcaagccaattgagttaagagtttctaagttagggtcctagtgtctatatgtgtacaacagtccacagatgattctaatatgcagccagccttgagaactgctttgatcttgtcattacattataaacccactgtccttcatatctgagtcatcctttattgcctgtggttgagtgttaaaccagtcattttaattcctagatattattataattccatagatatttcatctatgtttggttccttttggccatctggggctactttttaaaaaataaattctgttctgagacctcgctacaatgtagcctgacaacagaggctcagggtaccccttacaggtgaaacaaagctcatcatgaacaggaatctgggtgcagtggcttacgcctgtaatcctaacactttgggaggccaagtcggaaggattacttgaggcctggagttcaagaccagcctgtgcaacaaagtgagaccctatctctacaaaaaagaaaacaattagctgggcatggtggcgcacacctgtagtccctgctactccggaggctgcagcaggatgattgcttgagcctagaagttggagaatgcagggagccatcgttatgcaactgtaccccagcctgggcaatagagcaagaccctgtctttaaaaaaaaaaaaaaagaaaacattatgtttagaatatgtaggaaaagatgcaagtggggatctgaattgttacagctttcttttctgtcttttgtgtggtatacctgttcgtgtgtgtaactttggaattagtgaattataggtgggagcctgttttaacccctagagtgtcttatctgtacaaatctcataatttatacatactgcttgcagtatataaaacttcctttttttgctctttttttttttttttttgagtcggagtctcgctctgccgcccaggctggagtgcagtggcatgatcttggctcactgcaagctccgcctcccgggttcacgccattctcctgcctcagcgtcccaagtagctgggactacaggcgcccaccaccacgcccggctaattttttgtatttttagtagagacggggtttcaccatgttagcgaggagggtctccatctcctgaccttgtgatccgcccgcctcagcctcccaaagtgctgggattacaggcatgagccaccacgcctggcctttttttttttttaataaatgtttcttggcagatagttgttctaaaatgtgtccagtggtattgaaagtgttaataccaagaagttacattggcagtttttcttgttttcagacctggaataatgcctttggctcaatttaaaaatagaatctgtaatgttagtggaaattaaacatcctgaatagagtatggcatgtaagccacactaagccagggtttttaaaaacgagactaacaggctgggtgcagtggctcatgcctgtaatcccaacactttggcaggccaaggcaggaggaccaagctggacaatatagtgagatcccatctctaaaaacaattttaaaaaaaattaggtgtggtggcatgtgcctatagtcccagctactcaggaggctgaagtgggagaatcacttgagcctagaagttttagaccagcctgggcaacatagtgagaccttgtttcttacagaaaattaattagccagtcatggtggcatgctcctatagtcccagctactagggaagctgaggttgttgtaaccatgcgagttatagagaaacgccacactttgagacaaattaaagagtcctttattagccagcgacccagagacagctcacgcccaaaattctctcagccccgaggaaggggctagttttgtttttataccatggtctaaatagggaggggggattttagctgaagcaatttttacagaagcagaactggcagaaagttaaaaaaattaattggttacaaatgcagttacaaaaaaataaacagttccaggtaccggggcttaaactatcacaaagagataaatgtaggggttttgggtgccatgcactgcgcgtgcccccaggagctgctggtgcaactcgcctcagcatctcatcaacaggtgcattcctggacgtgctttgagtcagttttacactagctatgcctggagggaggtgaaagggtttacaagtgaagaagctaaaatggagtctgtccggctctctctctgctaggagagagtcactcgggttaaaacaaggtaggatatcacaaggtgggatgatcacttgagcccaggagttcaaggttgctgtgagctaggattgtgccactgcactccagcctggacgacagagtgagaccctgcctcaaaaataataaatataacaaaacaaattaaaaattaggctaacaccaactgttatgaaccatttactttatatttttgtgttttcttcttaccacctagtaaaccatcatactctgtgtgttataaggtttctcagaaagactatataagtaacaaaaataatgataattactatttattgagccagcagcataggataacagtgggtgtttgagatgtgaatactgtcccctagaattgggcagtgcactgccatacacggcagttttacattgggcacttatgtgccaggtaccaaattaaatgcctttcatacatgatttcatttattgttcagggcaatgctgtgataaaacataaggaagctgaggctcagagaggtctgagagccacacagctggtgcatggtggagccacgatttaaacaggtctgtctgactccagagagctatgcttttaactcttgtgctgtttacttttctggcctgttatagcatgtttgctcagaaggtgagcatgtattaagtcactttattacctgatgtttaaagaagcattggaaccttcaaaattaaaattggtactcatgtttttgcttttcgaacttgaaaatgaagcataaattggaattgtgttgagtatttatatgaccacagacttcagaatctgactgcctgggtttgattgaatcctgactttccaccttgatagctgtgtagttcctcattcactctttgttggccttggttttgacatcagtaaatcaggatataataatacctttctctgctggtgatggtgcaccttgtacactaaagctcttaaaagaatacctagcatatacctaacgtttgtgagcaactgctgttagctattacttcccttttactttggatgattctcttaaactttttgtttccttaggcagcgtgcaatgttgccccacgtggcgtgtatgtttgtggtaacaccacgaccacctctggtctgacggtaactctttcaaaagatagttcctctggagattttgctttggaagctggtgccctggtacttggtgatcaaggtgagaggccaaagggaataattagtgattctgggactttttgaaaagccttttccttttcagttaatttctttacattctgtttaagagaaacatttagatagcaaagtcctaaccagtaagttgacactgtcagaaataatcattggaaatgcagtatcatcatttttatactacagaattggaactgtacttaatgtcattcattttcagaatcttatagccgatacaagtatatgtaaaaatcaaataaatatgtgtagctccctgaacttcccatttcataccacctatcatatttgtgatcattttttttaaaagcctgttttgaagctttgtagtaagctccctgtatggtgggatttggatgtcttgtggactgccatgttcccattgcctagtacataggggcacagtaaatacttattgaatgcgttactatgatttagctctaaatagtttggaaaccttggcactgacaaaaaggtggatgtcatcctttgctcacagaggacttgcaataggagattacaggtgttactttcgatgtttttttctttttatgagacagagtcttgctctgtcacccaggctggagtgcagtggtgcagtctcagctttctgcaacctctgccttccaggttcaagccattctcgtgcctcctgagtagctgggattacaggtgtgcgtgaccacatccagctaatttttgtatttttagtagagacggggttttaccatgttggccaggctggtcttgaactcctggcctcaagtgatccacccaccacacctcccaaagtgctgagattacaggctacaggcgtgagccaccacacctggcctacttcagaatgaatagttttgccgtattgtaactgaactcattggttttttttcaggatttgagtgacaggtggtaagaagtccaggcatagggcccagcaagaagaaacctctacattgggctttgtcacctaagtttctctttgtgatgccttcaccttattgggaaaacatgtttccatgcatgtgtcaggcagtgtccagattccagtccagttaaggtcgttcattccttctggtttgccagtgacttccatattctgaacccaggacctggtagccacatttgacacagttaatcactccctcctccttgagacccttgaaactctcattggtttccaggccactttacttcattctttacttctttctcagtcgtttactggttcttcatctccacaacctcttacctgttgttaactaaggtgcttagttcttggaccttttgtcttctgggtctgtatttaccttcttggtgatcttgtatcgtttcattggctttacctacctatccgtgaaaaattctaaatttataatctcgtttcccttaaatatcaggcacatacttcttattgtctacacagtatctccacaaatttctcaaacttaacatgtctaaaattaaaatcctgattttgcctttcaaatctattttcacagtcttcctcatctcagtaaatgacaactctcattataattgctcaaatcagaaaacacggagccatccttgactttttctcataccccacattaatctgtcagcaaatcttgttggctgtaccatcaaaatatatctgctatctaaccacttcttcattaccctggtccatggcaccatcatgtctcacatggattattactgtaatctcctaattggcatgcctgtaaccacgcttgccccttcctgttgtttttaatacagtaatctcattaaaaattagattgtgttactcttgctcataaccctccagtaactgcccgtctcgctcagagtgaaagccaaagtcttgagagtggcccagggccattcatgttctggcctttcacctcttttgcctccttatctgctgcttcccatgtctcctcttctctagctccattggtggctctgccttggacaccaccagcacaccaggcacgtcacatttcctcataagggcctttgtacttactgttctgtttgcctggaatgttcttaccccagatagagctgcaaaggcttgttttctttcccccttaatgttttgctgaactgtcctgaccccagtgaggtcttccctaaataccgtattttaacttataacctcccctgcccctgctgcaccttagcagaccttattttccttaccctaatctactttttccttccatagcactttttaccttctatattgtttacttttttattgcctggaccccctattggctgagtagaacataagcttccaagagcagggaattttgtcttttcagtgccatactcggcattcctagaacatagtactggtatatagaaggcattcagtttattgaatttataaatttattgcatttatatctagtaaatatttgctgaataaataaataccaaaaacatgtatctcgttattatatagctcatcagaagtgagaatatctttgctaagttaccaggtaaaatatagtaataaaaagatgatactcatgaaaccatgcaacttcattaactagaagtagaaggtgatttggaggttttttaaaaaaattttaatgccagcactttgggaggccgaggcaggcagagcacttgagaccaggagtttgagaccagcctggccaacatggcaaaaccctgtctctactaaaaatacaaaaattagttgggtgaggtggcgcatgcctgtaatccctgctgctcaggtggctgaggcacaagaatcgcttgaaccaaggagatggaggttgtagtgagacatgatggtgccactgtactccagcctgggtaacagaacgaaactctgtctctcaaaaaaaaaaaaaaaaaaagttcaaagtttatgttttatgctttaaaacaaggggtcattaaactttggtccataggtcaaaccagccaacagtgtgttttagtacagtccacaagctaaaactggcttatatatttttaaaagattgtaaaggacaaacaaacaaacagaaaagcccaagaatatgtaaggttgtgcatggcctgtgaaacttaaaatatatacttctgcacatttgcagaaaaggcttaccagctcctgctttatactttgaaaagtgacagccaaagtaggaagtagcttgactttgttcctaccccatctctgaggaattgcattagcaatcttgataatttccagtaataccatgaatccagagaggtataggcagacggagcaataggcagctcagggaaaggtggagataaagcctgtgagtctaccactgctaggatcttagcacaggcagggaaggctcactatgtcccagagctccacattgaacagcaggaacaggctaatgcactgggatcccctgccatgaatatgggacacattcccaacagaggggggtgaactctcagaagagatcagcaagaaaggtggcacaaagttcaacaaagccccccttgcttccccctcctaaatcattacgttaccaaaaagtgcaaactgtagctggaaaggaaaaaatgggtcaaaattacattgggaaaagcgtattgacaagaattcatatatactgtgtcggaagaaataggtttggacagagcagccgttattatacatgagcaaggcaaagagacagcatagcagctgtgaagaaataacgtaggaagaaagaaagacatttaatatgcccagtaaaagacctcactgtagacaaaattataatctaaggaacaaatgaaaatttcccatgagtgtttcatgtttgataagaacattaatgaaatagctcaaaacaaaaagataaggctatgagagacaaattgatgactaacaatgttattaaactaatatataaaattgacactgctgaatgagaaattataaagaggaaaggcttgagataattgcagtgaatgcaaaagaacaaagcttaatacaattagaggggaagtaacagagatagagaacaaaggaaattcaacataattggttccatgaagtagaaaacccaaacatgaaaccagaaatggattcaaggatagaagaaaatctgttgaaataaactaaaggcactgtatgtgccaggaatgtcatgtctattgcacaagttattggggactctctaacattagtttacaatatttgtcttccctgctccccataccagttaggttagcagctggggatcaaaaagactaatcagcagttattttccatatactcctctgtgctagtaaggcttacttaggtatagagtagatacggaggggtttaaccacagcaaagcccttcagatgtgacccccagatactaacctaactggtatggggagaaaggaagacaagcattacgaggtaatgttagagaatctccaataacttatgcaatagacatgacattcctggtacatacagtgcctttagttagtggtggtgcattgtattatgtttaaagagattaagtgatttccctataagtgcatacaagtgtatagtcaatacctggtataggttttgaaatatacttattaaacataataaacttactatatgtgtattgaggtatacttattaaattgtgcatgtgtgtttgtgtgtgtatgtaacatcacacccatttgaatttaactccttaagcattttgagaattactcttacctcctcttcgtttttgtaatcctcacaacatagtgctgtgcgtatgaaaaatgctaaaggaagaactattacacaaaacttagttaaataagacaaatgtattaacttgctgcagaacaaacagtaattctccattgtatgacattttataattttaactgctgaaacaaatggaaataattattgtgaaacaatttctatcctataaaatttggaacttgaccaaagaaaaaatgttttttctgctttattctacttcgattgtaggtatttgtggaatcgatgaatttgataagatggggaatcaacatcaagccttgttggaagccatggagcagcaaagtattagtcttgctaaggctggtgtggtttgtagccttcctgcaagaacttccattattgctgctgcaaatccagttggaggacattacaataaagccaaaacagtttctgagaatttaaagtaagtctcttcaaatatttatacctttaatgtattgaatcactttaattcaataagaaaaagaaatagttcacagaactacaggggaaaaacatggatatttcacagaagttataaatgtccaataaatgcacaaaaatgtgcttaaacactgcagagtaaaacaatgaagtacgaatgagatccaccagattggcaaacattttaaatattaatcatttttggcaaagtagtgtggaaatggtttctcagtggctgggcgggtggcttatgcctgtaatcccagcactttgggaggctgaggcaggtggatcacctgaagtcaggagtttgagaacagcctggccaacatggcaaaaccccgtctttagtaaaaatacaaaaattagccaggcatgatggcagccgcctgtaatctcagctacttgggaggctgaggcaggagaattgcttgaacctgggaggtggaggttgcagtgagccgagattgtgccaccacactccagcctgggtgacagagtgagacgccatgtcaaaaaaaaaagaaaaagaaattgtttctcacatacacaatttattattttgtgggaccccttggtgtgttgatcacaattctaaatgcacattctgtttgttatagccactctacttttaggactactgttcacagaaatagtcatacaagtgcacaacgataggtttatagcatgggtattgcagcattattgctgccaaacattggaaacaccttaaaactataataagactgtagtgattatgagaacgaaagtggctttatatgtactaatgggggaacatgtctgtgctgtactattaagtgagaagagcacattaacaaacttaaatatgtggtatgatcctgcttttttcaaaaacaatgtttatatctgtatgtatgctttctcttctaattcattctgtacagcttggacaaaatgtgtggaaaaggaaaaatatatttaagtgatacaaaagtgagaaaaagacaaaagagtacctcctgaaaaattagagccttaagcctagtgggggtggagttaatttcttgttgtttaataatgtatcaatatagaaacagtctttgatacatagtgaaatacacaatgtgtacttggagatttagggtatttaccaccaccaccaaaaaaatcaacctactagtagtttttctttagtaaaatgacaaagtgctatattagaaaaatcagaaagatctattgaacaaaaatccagcagacttggattctgttttttaatggtatcatgaacaaaatactgaactagctaacctctgatatgtcatgtagcagtattgccaattagtgataataggacatgaagaattcagtgggtttgggggtgtgagaaagagccatgtcctcaacctacccagggtagatacatgtaattcttgtgcccatgttgcagtggttggatatatcgaatccaagaagctatttgcttatttctttaacctaaatcttggtttttcaagttctgcgtggaacttgagtagtaaataagtgagtagacagttttctagtttttccttttgattccaatcattgtttcttctttctttcatccttcatagaatggggagtgcactactatccagatttgatttggtctttatcctgttagatactccaaatgagcatcatgatcacttactctctgaacatgtgattgcaataagagctggaaagcagagaaccattagcagtgccacagtagctcgtatgaatagtcaagattcaaatacttccgtacttgaagtagtttctgagaagccattatcagaaagactaaaggtataaatgtttcttctccttattcagtttggttctgtttgaatgtcaaagttcagtgtgtggcttattgtagagcagtaggatacaaactttttttttaccagaactttttaatatttccatactagagtttacgtaaacttcatctgaaataatccaagtcggcctggcgtggtggcttatgccggtaatcccagcactttgggaggccgaggcaggtggatcatgaggtcaagagatcgagaccatcctggccaacatgatgaaaccccatctctactaaaaatacaaaaattagctgggcatggtggtgcgtgtctgtaatcccagctacttgggaggctgaggcaggagaattgcttgaacctgggaggcggaggttgcagtgagctgagatctcaccactgcactccagcctgagtgacagagcgagactgtctcaaaaaaaaaaaaaaaaaggaatctaagtcagctaagatgagacctacagataaagtgtttggttgatttggagagtcttttagaattgtatatttatctaaacaagttatttatttattctgagacatagtctcactcttatcgctcaggctggagtgcagtggtgtgatcttggctcactgcaacctctgtctcccgggttcaagtgattctcctgcctcagtctcccaagtagctgggactccaggcacgtgccaccacgcccggctaatttttgtatttttggtagagatggggttttgctgtgttggccaggctagtcttgaactcctgacctcaggtgatgtgtcctccttggcctcccaaagcgcagggattacaggcgtgagccactgcacctggcctaaacaagttattttagcagaaatattttatttgctacttatccttgttatcttgggccttttaatcatgcttcaggtggttcctggagaaacaatagatcccattccccaccagctattgagaaagtacattggctatgctcggcagtatgtgtacccaaggctatccacagaagctgctcgagttcttcaagatttttaccttgagctccggaaacagagccagaggttaaatagctcaccaatcactaccaggcagctggaatctttgattcgtctgacagaggtttgtttctttttatggtcatgctttttttggcttaaaggggaagggtgtgccttgacttctcttttgaagtattttctgcataattgactccattttcctttctatagagagatgttagaaatggatggatgaaagttttttaaaagattttgtcatgtctataacatatccaagtatagctacttctttctagtcacagaatcaattacttagcatgcaacttttcttttgtttttctttgactgactcttaggagactcctggaatatctgaaaagtggttaggttaactaggagtatgagacccaagttgagtatatgggaacatggaatgtgtcaggtatcttgagtattttatttttttacatgacaggtccacaaggatagttcctgtgtttttaacagcagtaatatctattcacagtttgaaatactaagagaactctggcagtaaaaattagctagctcagagtttgggctttttgctcctaaaatctgattaattcttctttgttgttttaccatattggttaggtatgatttcctaaaagtaaaaggcaagggaaaaccaagtgtatttcatcatcaaatctcctgaaatgatcactcagaaatatacgttaacaagtaaaaatgaggtttatccttattttaagtgagttgtaattttcatagtcaaggtttcacagattttttttgtttgtttgccctgagtcagggtctccctctgtcacctaggctggagttcagtggcatgatcaagcctcattgcagcctctcctcccaggctcaagggatcctcccacctcagcttcccaagtagctgggactacaggcatacaccaccgcacccagctaatttgaaaatttttttgtagagacaggtcctcactttgttgctcaggctggtctcgaactcctgggctcaagtgatcctcccacctcagcctcccaaagtgctgggtttataggcgtgagccaccacccccagcccagagaattacttccatattttgacttttgatgttataaccttcctcgcctaaaggtcagtttttgtgtaaaacaagtaaatgaagtaaagcttagacatactatggtaaatatattcatctttcgtcatctgaaaatggtgttttcttttaaaggcacgagcaaggttggaattgagagaggaagcaaccaaagaagacgctgaggatatagtggaaattatgaaatataggtaagataaaaatttcaaattgttttaaatgaaataccagttatcttcccatctcaaattaggtaataggccaaggctacttttatttagcccattgggtcacttattttcctcctaaacagagtaccgtttcttagtttaaaatatttctcactgtgtaaataatctttacattagaaatttttttgaatgagtaatacatttacatagtgctaaaatcagttccaaaacctattggagaagagctatttaccacctactcgcccttcacccagacacccattgcttttccacagtctgctgtttatactcttctgtactggttttgaattttaacaatatatccagagatctttttttattagagactctttttttatagctagagtattctattgtgtagatatactatatagtatatttgatcagtcccctattgacacataaatattttccattcttgtgcttttaaataatgctacaatgagtaatgttctacgtaagatacttcatatgtgggtaagttgtgcacctacgtgataaattctcagaagcgatatttctgggttcaacagtaaatactataggtttttgataaatattgctaaattgtatcctttgcattttacatcatttagtagataatgattcctagaaggtagaaaagaaaaattagttgagcatatatgtttaccttagacatagatttttaaaaatcagtaatattattttgggtagttttttttattccagataaaaaaatttttttaataggtccatactttcataagcttcaaaattccaaagttcaaaaagtataggccaggtatggtggctcacacctgtaatcccagcactttgggaggccgaggcaagtggatcacctgaggtcaggagttcgagaccagtctgggcaacatggtgaaaccccgtctctactaaaaatacaaaaaattagctgggcgtggtggctagtgcctgtaatctcagttacttgggaggctgaggcgggagatttgcttgaacctgggaggtggaggttgcagtgagctgagattgtgccactgtactctagcctgggtgacagagcaagactctgtctcaaaaaaaaaaaagtatatagtggaaaaagtttcctcctactcagcttaatagttaccccgttcttcctgctagccagtggcaattattagcagttttttgtgtgactacatatctatatattcttttttcccctttgtagacaaatggtaactataacaacataccatatacatgctataccttgcttttttcatttaaaatgcatttttaatatcctctgatagcaatgaaaatacattatctgttaggagtctacttttccaagaccaaaaaatatattgaagatgaaattatctaattttgttaagtaatttctaattcttctaaggtagatgaattcttttgtcctagtagctgctgattctgaggtttgcgtggtgtcagaaccaggtggttttgcccaggtggttttgcccagctattcccctttggctgtgaataaaagtgcagcatagctggaagagcaagggctttggagttcaacctggagctgccatggcaggttacacactgcttctcagtttcctctggtgtaaaacacaccacaaaggattgtgctctgaggtgtcatgcagtgatgctcaataaagtgacgaatacggttctgatacattagagaacactcagtaaacactgtttactatcaatagcgcaagtcttttttttttttttttgagacagtctggctctgtcgcccgggctggagtgcagtggtgtgatattggctcactgcagcctgcgccccctgggttcaagcaattctcctgcctgagcctcccatgtagctgggactacaggtgcatgccaccacacctgctaatttttgtatttttagtagagatggggtttcaccatgttggccaggatggtctcaaagtgctggccttaagtgatctgcctgccttgtcctcccaaagtgctgggattacaggcatgagccaccacgcctggcctgatagtgtaagttttgttgatactcagatgaggctgagcagatccccttttctctgagttataccataaaccaaaggcctcaaaaactggcagatctcaccctagataagaagtttccaaaatcacccttttcaaagaatttttatggtctagtcctcagtgctctccatctaaattgtgcagtatgtcttagctgcagatccttttcttcttgtcttttcctcatagggagagactttacctagttgtctctttgtccccagcctggtactgccccatccctggaggctgctgtcttctctctgctgcctctagaggtatgcagatgggtagaagggcacccatgtcacctcctgaaggtacaagaatctgcaggttgtttcctgcccttagagggagtccatggaagaagaggaacctttctccttaattcagtctcagagtttgtaagcaaccgtgaggttctactggctgtctttgaaagctttaaagattctagaattgacagctcttaattttttattggtggcaccaaagtaactgcctcataataagaaaaattaataattattgactcccaaccctttgagctaatttctaacaacttaccttctgtgtctaagtatcctattggtatggcatcacacagtgcttttttttttttctcttttatttagacagagtctcactctgtcatccaggctggagagtacagtggcgtgatctcagttcactgcaacctctgcctcctgggttcaagcgattctcctgcctcagcctcctgaatagctgggattacaggcacctgccaccacgcccagctaatttttttgtatttttggtagagacggggttttgccaagttggccaggctagtcttgaactcctgacctcaggtgatctgcccacgttggcctcccaaagtgctgggattacaggtgggagccaccgcgcctgacatcacacagtccttgacccatcaattttctctctttatgtgattcagtactagggtttgagggatcttgtagctgaaaattttaccaacctggctttagtccctctccagttgatctcattatgttggagaccctctagttgccatttataagcaaccagatagtctaggaatttactagactttctcatacaacttgctgctaggggcatggtgtgctagcatatgaagtaaaagaatggccacaaaatctagttgtctgcctgacttcttgtgggtatggctttctaagagaccagactagagactgacctagcagagatattttttcccattaggaaagtaagtcacaacccaaccaaaatttcagaattttttttaattttaactttttttcctataaaaaaaacaaagaccaaaaataggcacttcttatttaatgatgagaagttgcttgttgacttacagtctagaatgtgtgcatcttgctttctctgcatcctgcacttgaacactccacctttgggagtgtggctgagattcccactcctgatttctttttccttttaatgatctctggccctctgggtcttctggtgcctggctctcctgaatgtcatgtttctactttgtagactgttcatctgtcgagcaaactaaggggtacactaccctgctccttttctctcttaacctgtaacattctcctcttgaggctttaccattgctcaatttctgcaggccttagaccatagacgtcacctcaactgtttactgtttccccacagtaaattcactggtctgtggacacggtagattagttctcctatctgagcatcatgcttaagcagagtaaattaggctatatttaccttttcagtaaaaatgctatattgcccatttatggttggttatacttggtataagatttctctgcatgtctgaatactcatgttggacagtgtttgcatgtgctttcctgtccaagaggaactcttaagtgttgtctcatggaactctgtatttgtactgcttcccagagttgctttggtggtaaatttgaacaagtttcagatcagtttacatctgggcccctgaaaaaaagaggtcttattattaagtgtaaacagtacccacatgacattaccagattgtttccctgaattgtctcagtatgtttactggcattcataaaaattttcaggaaaaagaaaatagtttgattggaattacctgacactatgttcatggtagagatcaagatccagtgaaacacaatgaaattagattatgaattatctgtttgttatgctcaacatgcattctttccttagtttatgagagcagggaccttatctgactcatttaccagtatattcccagggcccagaatcatgcctgtcataaagtaggccttcagtaaatgtcctgcactgatagtaaagttgaccttagtaatgattcattcattcattaaatcttccatttcagagttttcatctcttcagcttcgttcagtctttgcccttaatgtggttttaaaccttttaagattacattttaactgggaagctgacagttgaataagaaaattcttaaactgtgacatagcttgtctgagttaccagagcacttagctgtattttaaaaaactaaatgcttatatttagtagacagttcacataagctttctcctaaaattgaaaacatactaggtagcagaagagaacagagccaccttcaaaggtgaaagatcattgtttttttctatttcaggaaactagctcaaatattttacatagctttttaaaatctgaagcagtgtagcagattcaaatctgagatatgccacttactagttgtgtaacttctggcaagtcactttaatcttagcataggttggtgcaaaagtagttgcagtttttgccataagaaaagcaatttcaaaaacctctattactcttgcaccaacctaataagaatgttttttcatccgtaaaatgggaataagaatagttcctaaatcacaggattgctgggaggattaagtgggatagcctatgttaaacaaatataattaagataaatgttacctattattattaactgaaagcatttttaacaactttctcatgagaaacaagcatatgggaggttcatcttaaaagagattatgctgtatttcagaggaaaacacttaccatcttactgttttatcatttttaatagttttatttgaatgactcattcctatttgcataacgtaggcttttaactattcaaggaacaaaaggaagctttattgtttataacccattaaaatcattcctgcagctcattaagggaagggattatacctgttttgttcaccactataagcctgttgcccagcaggtgaccagtatgtatttgactaattaattaattcctgattaaataacagttttgccaattagtctggctgtgaaatatagctatcccattgttgaggcagggaatcagcaatagagttggattaaacaggatggttaattatgtttctaactagtgttttcagactttagctaaaattcactatcaagtacgtacttctttccttggtgatattgtgaaaattagagaaagcagaagaaatctggcagtaataggtgcatcctttaatatctaaccagtatcactgcaactcaccataacctttctagttcattcctagagtattttaaataccttttatttaaaatactggtgcggccagatgctgctccaggagatgggacacatttttatttagtgaagtctaaatttattatatttagaatttcttttcttcatgaatcaaaaagaatgtcccaggtatttatattgtagtttatcaattttgtgtttttatgcatttctctctccaaatttagaagtttcttaaaagcagtaactgtgtccaaaatatttttattccttatcaatccatcatagtgaatttcagagtggcccctcaataaacacatgttgaaatgtttgctaagtgagccttgtggctacttccaaatttttcttctgtaacctgaaagcccaggacaacaatttctatggcagtgctacattgggtaattttttcttcctttctttttaagcatgctaggaacttactctgatgaatttgggaacctagattttgagcgatcccagcatggttctggaatgagcaacaggtcaacagcgaaaagatttatttctgctctcaacaacgttgctgaaagaacttataataatatatttcaatttcatcaacttcggcagattgccaaagaactaaacattcaggtatgttaaactagttaatctcttttgtaataatttcaggaggtccttgttaatatatagtagaacagaaacagtttttacttatttaaaattcatacctgcttcttctcaaaggttttcagcatcttgatagtcagagggaaacattgtagtaagacagtctctatgtttttctgactgtctcttgtggatatgtcattttaacatcttttaacgttgcatccctcatctgttaaatggacatgattataccaattcctacttcaaagttctcgtgaaaatcaatgtaatagcacttcaaacatgggctgttacacattatggaaaattaacttcttaatttcaaaagttagcttgatttttttcagctaacctaaaacaaatgtaaaatattctctgcatattggaatttttactttttatttatttaggcattatagaatccagaactcaaatataggcagtttgctctgtaagaaataaaaataattttatttggccaagaaactttacaggtacatattattatttgagagatttattttaaaagtaatattttgacatgttacttaatgggctaaaccttttgatgttttcttccaggttgctgattttgaaaattttattggatcactaaatgaccagggttacctcttgaaaaaaggcccaaaagtttaccagcttcaaactatgtaaaaggacttcaccaagttagggcctcctgggtttattgcagattaaagccatctcagtgaagatatgcgtgcacgcacagacagacagacacacacacacacacacacacacacacacacacacacacacacagtcaaatactgttctctgaaaaatgatgtcccaaaagtattataataggaaaaaagcattaaatataataaactaatttaagaagtgataaagtctccagatgcagtagctcacactgtaatcacagtgactcaggaggctgaggtgagaggattccttgaggccagggttcgagaccaaccttgggcaacatagcaagaccccatttcttaaaaaaaaaaaaaaaaaatttaaacttagctgggtatggtggcacatgcctatagtctcagctacttgtgaggctgaggcaggaggattctttgagcccaggagtttgaggttacagtgagccacaatcacaccaatcactgcactccagcctgggcaataaagtaactcttgactcaaaaaaataaaaaaaattgtagtggtagccatgtgttaattgttaaataaattctccaaagggctaaaagtaaattacttataaattttttatagttgtatttttgacctgccttttatatgtatgaatatttcatagttttgcatatcagatgtaggcatacagacaaatacataaaccaatgaatatattacatattctgtgttccaataaaactttatttatggacactaaaatttgaatttcataaaattttcccatgtcaagaatacaaaatacttgagttttgtttttagctatttaataataggtctcatttattccacaggctgtagtttgtagtcttgcttgaaacaatagaaacagactgattaagcaggagaagttttttgaaagaattttgtttggctcacggaattattagaaggcaggtgaaccaggagggtaagcttccagcagcaatttgtaaaaccatgccttagaattggactaaggaagaagctgctgacactccactgccacacagggcactggaagaaagtgctgctgcctccctgccccacctttgccacttctgcagcaggaataggtagaagaatgcccccacccgcaccggaacagcaacaaaaggattctgcatgagatgcctccctaaattgctgaattcaaaaaagaagttgcatacaaagacatctgattgaaaaagggtatgttatatgcccctttcataggctgctagggagttttcctggttctactttcaggtggtgggatcaataagaccagaatttctcatatgttgtgagaggattcaaatgttacagggttgccagccaaactatcaatcatgtataaatccaacaaacactttgtaacatacaagaactcaggaaatgtgaaccattgttggagaatctactaaaatacggcttcccgcaaacgaagatgaatggaaaatgtaaataaaaagaactggcagtgtatatcagatgtttaactataggaccagaactaagatgtggagactattgccatagaccacaatgtaaatttttaagtgaggaaggaaaaatcaggaatcaaaaggggccaggtgcagtggctcacatctataatcccagagctttgggagttcgaggcaggaggatcacttgaagccagttttgagaccagcctatgcaacacattgagaccctatctctacaaaaaatagattagctgggcacggtggtgcatgcctattgtcctacctactgtggaggctgaagtaggaaatcacttgagcccgagagtttgaggttacagtgagctatgattataccactgcactccagcctgggcaagagagcaagaccttgtctcttaaagaaaaaaaaaaaaaatggagaaagtagatagtagtataaatatagtgaagtctttaaaagctaggagttaaaagatatttaaagcaaataactcaggcatggtggtgtgtgcctgtagtcccagccactaaggaggctgaggcaggagaatcacttgaacccgggaggcagaggttgcagtgagccaagatcgtaccactgcactccagcctgggcaacagagtgagactctttctccaaactaaataagagatatttaaagctgaaaaaaaatctattaatagaatttaaaacatttcacaaaagtcaacacataaataatatcaaccaaaataaagtggtagacagaagagaaaatatactaatttattgttcaaagaggaaaataagtctcaaaggttaaggctattatataaatttatttttaaaaagacataaacctacattttcagaagaagaagttccatgtttccttagattatgtatttagcatccattaatcacagggccaaactaacaacaaaagttgtttagctttcccttacaatccagcttttatgggtgtgcaaacatcacattacagtccctccaaccacaaaccccaacatatagtatttcacttcctgcccaatagtgggtgtccccacacctttcaaccactgtagcaacaaagctctggcctaggcttttcacttgcttctttactgcctgactgactttggtgtttcctcatgtggcctggtgtggcatggcacgccctcttgggagatgaaagtaatcttccataggcaattgtttctgtgtcaccattgctgattaaaacaaatcctaagtacaaatgtcagaacagaaacatgcaaagcaagaaaacattacatcatgaaagtttctttttttttcttttttcttttttttttttttttgagacagagttttgctctttttgctcaggctggagtacagtggcgcgatcttggttcaccgcaacctccgcctcctgggttcaagcgtttctcctgcctcagcctcccaagtagctgggattataggcatgtgccaccatggctaattttgtatttttagtagagacggggtttctccatgttggtgaggctggtttttaactcccgaactcaggtgattgcctgcctcggtctcccaaaaagtgccgggattacaggcgtgagccattgtgcccagccaaaagtttctttttcaagagatggtggtcttgccatgttgtccagtatggacttgaactactcagctcaagcagtcctcccacctcagcctcctgaatagctgagactacaggcatgcaccactacacctggctgcgagatgaaattttaagagatgggggtcttgttctgtcgcccaggctggagtgcagtgacatgatcaagccgtgatctcctgggctcaagcaatcctcctacctcagcctcctgagtagctggaactacaggaatgcaacaccatgcccagctaattttgatttttagtagagatgaggtcttcctttgttgcccaagctggtctcaaactccagggcttcctgagtagctgagactacaggtgtgagccaccatgcccagcctcctctcttttccaatattgtgttaagtaaattgtattggtggtaatcaacttgatcatttcatttttaggatagagatatcaaggtgagggtataactgaacgagaagaggaataaacaccaccctgtgattgatggatctttatagctctcctttgataaagaagggaaatatcgtacttacattagcatgttatagttgctgttgttatacagaagaatattaaacaatattcatatattgtttatgaatgcattgaattcataaacaatggtatggatattgactagccaaagaggtggataaatgtagatacaatgatacggtgatttggtattcagtgtccattctgctctcctagtgtgccttcctataatgcaggggctggaaggtgagaaaataaccacatttcccagactccctttgcaggtagatttccagatgtgaattgggttccactgatcagacacccatgtgtgagatttggaatgcagaactgaggagagagccatcttcctcttgcttgtgttctggtggcatgtgtggttgaggagacatttaatttccctgcagcagaattcttgcagtcagttgttgaggcaagtggcgtggtggatgcaaccctgattcttcacctttctcattattgtggggtagcagcgcctctggcaagccagacagacctgcagtgtttttctgggagttaattctggagacccagtatggaacccactcctagcccttgtgacaatattgcaagcatccagttccctgttttacagtccttttaaatgtggctagctacagtagtttgtgtttcctgcaactaatcactcatacatctgtatctaaagcactccacctgggtcatgtactatacttaaaattataaggcaatattaattcacaaaactacctactcgttttatttaaccctcagaagaactgaaaacaaaagctataccaggcttgctctagagcgtgggcttgggaatggaaaggcagagtgcacctattgaattccatcatcagtttttctataccatggagttacttaccatgtgtatacataacactgattaaaaattttaaaaaaaaggttaaaacaaaaactgagccagattctgacatttaaatcagaattattcttagtacatagacttgcaaagtcactgaataattccttgggactacagactcttagtctttgcttctagaaatgtatagtaatttcaacatgtcatatatatagagagagtatatatgtgtatatatatacacacacacacacactatatagagtatatatatacactccatatacagtatatatactagtgtgtatatatatatacactagagtatacacactctagagtatacactctataaagtatatatattatatatactatatattatatatactatatactctacagtatatatatacactatagagtgtatatatatactatacagatatgtatagagtatatatactctatatatacactatatatagtctatatactctagagagtacagtatatatatatagtgtatatatactctatggagtgtatatatattctctttctctccatatatatatatatagtaatcagcttcctcaggttgaaacatctagatatattgaaaacactggatagtctgcaaactcctcttccttagagaatgtatattatctttagtattaaagtgactcttgtaagtcctgagaaacacctcggaacactgcattcacgtgtttgctaggcagaatagtacccaccctgcaagacatcacatcctaatgcccagaacctgtgaatgtgttaggttacatagcaaggggaaattaagatggctaatcaggtgaccttaaaatagggagatcatcttggattatctgcatgggtccaatataattagaaagaacctttaaagtggaagagggaggcagaagagagccagaggaagatgtgactacagaagaaggcacggatgcagcattgctggctttgcagatgagggaaggaggccttcagccaaggactgtgggtggctctagaatctttttttacatctcagtatgtatgccacagttaaggtttttgtttttttatttttgagatggagtttcgctctgtcatccatgctggagtgcaatggtgagatctcgactcactgcaacttccgccgccggggttcaagcaattctcctgtctcagcctgagtaactgagattacaggtgcgtgccatcatgcccggctaatttttgtatttttagtagagacgaggtttcaccatattgatcaggctggtctcgaactcctgacctcaggtgatccgcccacctcggcctcccaaagtgctaggattacaggtgtgagccactgtgcccagcctcacagttaaggtttttaaacaatctgatttaactgaataaaaaatgctcgcttgtgtggcgacatggtttttaaaaatgtaaacagagctgggcatggtggctcacatctgtaatctcagcactttgggaggccaaggcaagagaactgttgaaggtcaggagttggagaccaaccagcccagggaatatatagggagaccctatctcttaaaaaaaaaaaaaattacctgggcatggtggcatatgcctgtggttccagctactcaggaggctgaggcagtaggattgcttgagcccaggagtttgaggctgcactgagccgtgatcacaccactgcattccagactaggtacagagcgagtctatgtggagtgcaatgtctctaaaaaaaaaaaaatacccaaaatataaacagggactatgaggtatgtacaggaaattaatagctgaagaatattttaccatgttcaaaaactaaattcttcatgtggctgagagaagaaagaaaaaaatggtatgtttgtgttccatttgcaggtattacataaacccattttaaatgaactaaaatgcctaggatttgggggggaaaaattatcttgtgctcgcatttgaaggttcttctcagaaataaactgtttaaagagaccacagtactggtttaattttttttctgcaggaccagagggaaacaggtggtttaccatttttggaaactctgtcacatgatctgaatagaaaggatagttggatgtaacgttaaagctttctgaaccagcaatccccaacctttttggcaacagggactggtttcaaggaagacagttttccacggacctggatgggggaatgtttcgggatgaaacttccacctcaagtcatcattagttagattctcataaggaacgcacaacttagattcttcgcatgtgcagttcacagtagggttcaccctcccatgagaatcgaatgcgctgctgacctggcaggaagcagagctcaggtggtgatgctcgcttgcctgccgctcgcctcctgctgtgtggcctggttcctaacaggccatggattggtactggtccacagcccaggggttggggacccctgtaacaaaaggaaaacaagattcttaaatctttacaggaaggaggaatggaatggaaaataaagctagttgtacactaaatgatgttaacaatccctttatcacctttaaaatatgagcagagaggaaagaaatattaaaaccaaccctttttactttcttatttgtagataatgcctgccttacgagaatgttatttcttttaaaggttccaaaacaaccatataaaaacttagtaatgacttaattgttcacatattctagtgacatcagtacattttcaggaagaaatgtggaaaggttggcactagaagttgacataagaattagtttagccaggtgcagtggcacatgcctgtagtcccagctacacaggaggctgaggcaggaggattgcttgaagccaggaattctgggctattatagtgtgctatgctgactgggtgtccacactaagttcggcatcaacatgttgatctgggagtggtggaccaccaggtttcctaaggagggatgaacctgcccaggccagaaatggagcaggtcaaaattcccgtcctggtcagtagtgggatcgccccgtgaaaagccacggcattctagcctgggcaacatagtaagaccctgtctcttacataaaaaataaaataacaaaaatgaaaaggagaattagtttagatctcttgataatttaaacagtaatctaaattatagagtttaggtggagttaatctctgcaagtcctgaggagctatgcccaaggtgcttggccctaccagcaatgcactcttttgcttacatgtgtttcaaatcttaaatcccatcatttagttttttcctatttaggctgtgggacggtgcgtttattacaatgattgaaacctgtgccttatttggattactggttattcaaaacacatctttgggtttagtgcctggtaattacagcttactcctgtaagatttaactgtcattgattcctagagaattttttttgagacaaggcctcggtgggtcacccaggctggatggagtgcaggggcacaatctcggctcactgcaacttctgcctccctgggctcaagcgatcttcccacttcagcctcctgagtagctggtaccacaggcacccaccatcatgcccaggtttatttttgtatttttggtagagatggcgggcggggggagccggggggtacggtgtgcggggcaggggggtgggggggtggtcctcacagtgcccaggctggtttcgaactcctgagttcaagcagtccacccacctcggcctcccaaagtgctgggattacaggtatcagccaccatatccagctgttttaatttgatttaacttccaatcaatatttacataagactcatttgcaaaactgccttctttacattatcttcttctggttttaggaaacaaaaagtagcccaagtttattgtgtcctagactaaataacacaagtaacactacattacactgcatatctgatataagaacgcagtacacatatttctagactttgttcatttatccccaggcagaaaatattcataatagatttggaataagattttcttctcaaaaagcttaaacttcaaatagaagtgataagtgagaaagaatgattgggttgcagaattttcaaaagcctaaaaacagcctgggcatggtggctcacacctgtaatcccagcactttgggaggccgaggtgggcagattacttgaggttgggagttccagaccagcctgaccaacatggtgaaatcctgtctctactaaaaacataggagttagcagggcgtggtggcatgcgcttgtaatcccagctgcttgggaggctgaggcaggagaatcgcttgaacctgggaggcggaagttgcaatgagccgagatagcgccattgcactctagcctgggcaagaacagggcgaggattcatctcaaaacaaaacaaaacaaaacaaaaaaacaaaaacagaaagcctaaaaacaggttccaagaagttgtagcaaagaggtaatttgttccaatatacagcacagtcatacacagcactttgcaacttaaccaaggaaaacattaaaagtggcaagacaatactaccctctaggggccaaatttttatgttcacaactcagcaaaggatcaatgaaaggatgaactaaacagttaataacaggccagttattcaagattgaacaatcctttctcttttcacgttctcttggggtaagcactacatgattgactacagaagttgggataagacacctgaccagtacattttggttacttatgaaaataattctgatacaagggtggagagagaaaaatttgaaatgaacttcatgaaacgtagaatttatatatagatttttatttatatttttattacagacttactattctaattttttccccatttgggaaaaaagttcagtgacagatattcccagtcccttcagacatatgaggtgcctgtgtgtttaatctacttggatagaaattattacagaattcataaaacaggaaatgaacattataaaccagttactaactgtagaatattttggtttcctctgccccctgccctgctctaaactctacttcactgggtttctgcattttctccatcctttatcccagattaacctgttcatttattgacttctgtcaagttctagaaaatgagatcaaagactgatagctggatgttctcccgtcttaaaatgttagggaaacagtttgttaaaagcatgttactctttagtcataagtattgagcagtcattgtctttcaggccaaaatgccagccactttattttcctactttttaaagacaattagccatcagcagtttgtagtagagctggctttttaaatacaaaacagtttattatattttaattggcggactctattgtatcttggagtttttttctctaattttatattgaagtgaaaaataggaagaacataaaatttgctacatagataattttggggatgttctattttaaacattgataacagtataattccatattttgaaatatacaaaaaatatatacaactaaaatggtatctaaaacagaaacctatgaatgctagctccaaacaataaggcaaataagtgaagagctcaggtaatggtgttattcttgagggcacaaagcctggataaaactagattaccataaatagtagtacggaagttgaagaaatcaacacagtaactagaattaatttagaaaaaattaataaaaggttggacaaataccataagtaatagaaataaaacctatcagagcaacaaagggaaaaaacacaaaaacaagtttgtgtcctcagtgccaaggattagaggcagatgaagtacaggctgaatatagggaatagaaagaagtcccaagacacaatgagtgtcttaggaagcggagagtgaataaaggcaatctcatgaaaggaagggagagactggaatcctgcccactccctcttgccagggttatccagaattaatgtttacctatgagaactgtgtttttaaatagtttttaaattttttaaaatttttacattgctgttgcagaagtttccatttttctctcaatgtcaggatttcaatgtaagaaatagattttttttggataaatacccgctgcttcatctacaatgttgctcactttcagttggcctttccctttcctaactacccgaattaagactttaaactcaactgtaaggtagttcagccatcatagatggggttagtggggcgatagtggagaggcggcaataatcattcaaattcagttcaacactgaattcaacaagaaaaaattctgtaacattgcaaatattgatgtatcaatatgtttagtatactaatctgaatatattaatcagctaattaatggtgagctgattcataactgtctcggatattataggcaagtttcttaacctctctaaacctaagtttccttatctgtaaaagtaataatggaaccctcatcttgcagtcgttgggaggattaaacgggatgatgcactatagcctggttatatagtataattgaaacttttgtactagcaatgtaaaaatttaaaataaaaactatttaaaaagacaattctcataggtaaacattgattctggataatatagtattactgttttcagcaaaacaatcagccattgctattactaacatttactaatgcttatatttttagcatatgcatctttattcaatgctcaaagaggagagaattacagagccaatatttattaatcatttcttctgcactagatactgtaaaccacccacaagaaccgtagggcgccgcacgcaccttggagggggcccttctgccggccacccgcctcagagggtttcaggccagggcctgaggtggctccggccccctcgcggctacgtcggctgcgcggtcatcctatcttgttcgtttctcccctttccccgcccacccccgggccttggctcccggctgcgggccaggagaagagagcgccgcgtacccgctgcttcccaaaacccactgagcctgatgcgcgcgcctccgctgtgccaggggcgccgggaagcccgacgacgacggtgtcgtaaaagcgtcgcgaaggcgtccgcccttggcggcttcctgccacctgtataagtggagtgtgctggggtgtgtaaagtagtatggaggcagcggtagcccagtgtctgagtggttgccgggtctccatggagaagcggctcgccagtgtcccaggctgctgagctctcgccgcccgagaccccgcggcgcggccgcagggccatgctagccttgcgcgtggcgcgcggctcgtggggggccctgcgcggcgccgcttgggctccgggaacgcggccgagtaagcgacgcgcctgctgggccctgctgccgcccgtgccctgctgcttgggctgcctggccgaacgctggaggctgcgtccggccgctcttggcttgcggctgcccgggatcggccagcggaaccactgttcgggcgcggggaaggcggctcccaggccagcggccggagcgggcgccgctgccgaagccccgggcggccagtggggcccggcgagcacccccagcctggtacgtaccgatgaggcggcggcgggccggccctgggctggggtcgccgcccctgcactcaggtaacaagctctgggtggtgcagctcggacgcttccgtttcctaacttttagactcttccctgaaaagaagttactggcaggtcattcggtcgggatgaatttcagggtcaccagcggggtccacctacggtctctgtggtcaagttagaaatcctctcatcccccttctatctgcacccgttgctggaagggccgcctctgcatattgcattgataaaggtagccttcgcttgtcttactaaaagcctatttttaattcttttgaagtgaatccccagtgtttagggcaagtctttgggaatatttagaaaggtatacaggcccttctgtttgcttgtgcaagttccgttcaccatcatttgacctttggtaaccttacacattataggatgaaggtaattaaataatttaggtcgtaattaaaagatcttttaacctttaattatagaaaaagatttaaactattcttgaggtaacggagggaagtatttgtccacttacctgttgatatgctacccagacagaagacacccgagcatgagtgtgggagagcttttgatgtcatgttagcaagactcatgcaattattacatcttcaattgttatgtcttcagtggcccctgtactgctttcatcagttgtacagcatgggttgaggtggccagatcctggcaggggtctcaactccactgatagctaaagcatgttggggtttgaatgctggatactttgaagttgccatatcctgactgaagtccttcccagaacggcagtagttggtcgagtatgccacaggttatctggttgagtaatctgagattagctctcctaacattaactttgaaacttttacggatttaatgattacaaattaatgagacaccttaactgaaatattctatgtggagctaaaaagaactcccttcactgttccagcaacattgagttctgtttgttaattcgccaaatgaaatgatgtttctgtttacaactttgtctttaattttgccctgtggataatttctgaagttaatttggggaccttttttctgatcttttgcttactgcttttttgcaaccgtgtgcagccttctcccctcccactcttccctttgagttgctgtaacctttgatcagtatttgacttattctctaccatagtatggtcaacagacttatcttttttctttggactctgaaacactctgatatttgaacttgaatttgggatgtattccaagaatgttttcattgtataatgtggattactttcagtaaaagatctcagagtagaggtttgtattgcttcttgttttgtgattgctcttcggataatttgaagtttttctatagctttcaatgacagtattctgccacctgaccccagcaataactatttaattatccctccaagctgaggtgctttcttgctgggtttcttttataaacacagacatagtgtctttagagaatacttttttttttttttttttacaggatagttcatagaattttaaaagaatcttcagaaatggaattttaaaagaatcttcagaaatggcctttgccaccttttttacaaccaaaattaagattcaggcaagttggctagtactgattaagaaagaggttaaaaggggttctagagaagagaaagtcccatggagtggaattggcagtcttgacacagcggagaaaaaaaatctaggcttcagggaaaggcgttttcttgttgttatttctgtaccctgttgtgcaaggtgtcttagctccgctgggccgaggcttttcaaagctgaaatatcctctcatgagtcagattctgtttggcaagaaggggatgttcttcagacagctgccaaagagctcttttgttagtgccaacttcaaacagcttggctccaaatgagttgtctaggaattgcaaagcccccagatgggagctgtgaaagtccttggtttttagttgaggatcttaacatttccatgactgttttgaacaaatttacacaatttctcgatttccaaatatcacaatccctattcctatctccattttcttctagcagttctctgacttagtgatgaggttatagaattaaatctgtttttgttctcttcattcaaacctccatacactctatatagcatttagcattctttagatatgtgtaagggagtgagggagattctttgcagtatttaaagctgaatgcctggagttgataatttggccttttttcctgacacttttacttgtaagtagacactgtttgtctatttacaagatcttcctgaagtttcacctttaaaagcagagtgttgaaagttctgagttcttacaatgaagttatatattaaaggcttagcttatatggcagataatacatgtgttctgtcttccctctcttaagaaaacctataataggccgggcatgctggctcacgcctgtaatcccagcactttgggaggccgaggcaggtggatcacgaggtcaggagtttgagaccagcctggccaacacagtgaaaccccatctctactaaaaatacaaaaattagctgggcatggtggcgggcacctgtaatcccagctacttgggaggctgaggcagaagaatcacttgaacccgggaggtggaggttgcagtgagccgagattgtgccactgcactccagcctgggcaacagaactagactccatctcaaaaaaaaaaaaaaaaaaagagaaaaggaaacctataatatgtaagacaccttaccctgtgtttcggtacatgatacatcttcatcttttgtattctttttttttctttttttaattaaaaaaaattgagatgggattctctccatgtttcccaggctggtctctaattcctgggcttaagggatcctcccgcctcagcctcctgaagtgcagggattataggcgtgagccatcatgcccagccatcttctgtattcttgaaagaagattttagggagatatctgtaaaaagaacagaatggattttaaaattcaatttaatgtactaaatttaaagtttatgtagcttctgactgaagttgatgaagtatatttttctaatgtatgtatatagttattcaaagtatgaattcatagtattttacttaaattttgttgtctttgtgtttcagtatgaaaacccatggacaatcccgaatatgttgtcaatgacgagaattggcttggccccagttctgggctatttgattattgaagaagattttaatattgcactaggagtttttgctttagctggactaacagatttggtaagttgtaaatgcactcccagtttgctctccttccaaatcctggtctgtactactaaaccgaaatagcatagccttagcctgcttttccttgggaggaaaacctcaagatgaatttgacgtggtactttttgtgaggactttgtctttagcatctatatgggatttttttttttttttttcatatgatttcaaggaggaagcgaaagttgtagggaagtaaaggaggggatactttgtactcttggtttttaagagtgaaagaaacacccttagaaatttccaaagagctgagtgcttgctttagggatagaaataaaggagaggagatctgagatgacttttctatgtattgtggtaaagaggaatactcagatctgcaaaaaaaagttggttttcctagtggagagggaaactggaccagttgttatgacccagggaactgggatatgaccagaagcatgtagaagtcatagctttgctcaggtttcatgctagcagaaggctgtaggtacccccacagatttattttctgatctctgctctacacccctctgactgccctgcagaatactctgctctgggctgacaattggacgtccttccttcattctcctccctcagcagatggacaaagaagaggagctctccttgatactacattgttagttttgatagaggagaggaggatttattcagatgatctcaaattagaactggaaaataattttataacagaaggctacattaaataggcttttgtggactggctagccatcatcatgtatgacattatttgtattaccaactttatttcaaaaaagtttcgaaatgcattataaaactggctggacacagtggcttacacttgtaattccagtgctttgagaggtcaggagtttgagatcaacctgcacaacatagcaagagcctatctctacaaaaaatttaaaaattagctgggcatggtggcatacgcctgcagtcctaggtactcaggaggctgaggcaggaggattgcttgagctcaggagttcaaggctgcagtgagctatgatcgcaccactgtactctagcctgggtgacagagcaagaacttgtctcttaaaaaaaaaaaaaggaaaaacttcatgctgtataaaaacatagttgagggaagtgtggaaaagatggaggaataattttaaaccagggcagagttagcaggagaaatagatacattatattcttgtacaaggttggtctgagatctatatgagcatccagacaggcggtgctttggtgcctcttcaaactaatttatgtttgaaaagctttgctcaatatttattgagtgagaatcgagagaaactagttttatattaataaaagttgtatgccgtctttctttgtaacatcagctgttctcttcgaggttcatagaaacaaaattccaccttcctagtagcagtagcattggtgggcaacataaaattaacagaagattttggagtgcagacaaaagagagcatttgcattgttacatggcatttccaaacctgcttcaaacatagcctcccaaattggctttacctctctttttccagagtttagcgtctactaatatttgtcactacctcttcccattctcacaatctttctccttttcttttgtccctgcttttttttttttttttttttttttttttttttttggggagactgactctgtcgcccaggctggagtgcagtggcgtgatgtcggctcactgcagcctctgcctcttgggttccagcagttctcctgcctcagcctcctgggtagctgggattactggcatgcaccaccatgcctggctaatttttgtatttttagtagatatggggtttcatcatgttggccaggctggtctcgagctcctgacctcaggtaatccacccacctcggcctccctcggcctgggattacaggtgtgagccaccacacctggcctgtcccttcttttatcccaaagcctgcattcattgttaatattatctccaagtctgtcaaaggccattatactgataacagtttttttttaacataacagacaagatctttttcagttactgtagtctccttttttgtctgctacgtttttttttttcttgtaagctgccacatgagattgcagtattcattgaatgttagagaggccccattaacattttactaaatatataagatgatgtttgtggaaacctaagttaactggtgccacatttcacatttgttccatggagattttagtgcctttcaattggccactgggaggtggtcggactcatcagtttaagccagggaacgacaaagtctgattgcgttgtgtgtggaaaatggattatagacagctaagagtggaagctgagtaagtggttagggggctgaccatgatccagcaagagtggaagcagagtaactggttaggggctggccgtgttccatggcagccgtggtgggagcttagactggggttggagtttggagttggagagaagtgtgtgggtttgagatatattttaaagacagaagtaatatgtggatggattagatatggagtgagagtgggaggagtcaaatatgaatactagggacttactttaaaaaaaaaattctcttctaaaaccaggttcatggaaatgacattttctgtgatgggcaacacttgagtagggcagagtttaagggagaatactaagaattctgttgcctatccacatagaagtatcagttgggcagtttagtagtttggagttggaggaagtcatcgttacagagagagaaatttgggagctgtcagatatagatggttggatctgggtaaaatcatccaggctgaggtaacaggaatgaagggtcagagaaatgagcaacaagtaaagcaccagaaaagaagccagtcaggaaccctgggaaggaatagctggcgaggaagaaaattaggcagtgagatttcccagaaagtggagaaagtgcttcagttgtgtcgaggtcaggtactctaaaaatgcggagttccttggtgacctttatgagcctcacctctggaggggtggggacgattggagtgggtcgatgaacacatgtgagatggtaatgacattggacgttcctttgaagcagttttgctttgtagggggatagagaaataggatcacagaagggtcttttaaaaagatatatactggggaattatatctatgtgtatatagatagatagatataaaatcctatatataaaaatatatgctggagtatatgtatatactggggaatttttgtttggcctttttttttttttttttgagataaatctcgtgttgcccaggttggccttgaactcctggcttcaaacgatcctcccacctcagccttccaagtagctgggactataggtgtgccactgtgcccagtgaatttttgttgttagttaactgattaattaaatgatcaggtagaaagattaaatgaaagggagagatggatgatgcaaggggagatggggaagaagggaggcaggtcacagaaggtgagagggcatgggaacggatgaaggaaggcagagagaatgaatggatgcaggtaggtgggggatttgatgatgggaatatgaggatgggctgactacggttttctttttccttaaggaaaatacagacatgaccatgagcgagagggatggagttaggtctgaggtgagagcagagacagtgtggaagagacagtgtgaaaagagagggtaaatatggtaaacaagtgtgggattgctaggcagtattgggtgcccatgggagatttgtggtcatcagtttgaagtgagaccagtcttcccatttgtgtgttttccttaagcactattcagctcttaggtgcaggcccagagtacatggagagttgcttttaagcagtgttgaaggagagtggagtgaaggggagttacagatgtttataaaggaatgatgttgatgaccttggaatctagtgtggattagaggaatagtgaagatgagagggtgatgatggcgaaaaagtgaaaggttaagttccctgaggtcagaaactgaactaaacctgatcttccaaggtcccagctccccaggctaggtacttttctgttcgtatgcttaagaaggaaatagattttttcagttgcaatagcaatagctagtaactgctttttttgaggatttactaagtgctgagtgctgaacaagtattaatcacattgtgtgctgaagacaaccacccctttgaggtaggtaatttatctctgttttacagatgaggaaactaaggcttagtcaggccaaataacttatccaagatcacacagctactaagtggcagagccaggacttgaacagcttctgttctgctacaaagaccacatttttttttaccacggtcctggactaccgctgtctcctctaactcattggaatacttgagatatggacaacttacttgttctttaaaatgaaccatgattaattgcgtctaaattaatcttttttccccttagaaatagtattagagaactcaaacatttgttgaaacttgaagttaaatgagtaaaagccaggaagggacttggataaaccagaaaatatctgccttgtttaatgtgaatagacagtacttgatttcagtccattttgtggccccagagtggccagaccgctcccttctcaagttaggatggagacctgggtttttatgggaagaattgaatacttacatgttgataactaattacagtttttaaaagctctgataggtcaaacagaaccagcttacaggctccatttggcccactagcaactagatgtgacttatgctttaaatggtttatttttaatcacaataatataaaaataaataatttaagtatcagaattttaactaggccaggtagagaggattgagttttctattcaaatgtaggtaatgcagatacagtcagagtatggaataaacagtggtattgagcaaaatgagttgaaaaacagaaaaatggtaagttttaacagagttggattatattatcctagtccaggctctgccgttcatgctttctttgagttttctttgggttctttatagctgtaaatacatcactaaccgtatctctaaatgtgtatttgggttcatcccacaaaggggccttgtgaaaataccgagaaataaccagaaggacttgagggggaaagaaaataaatgtgcatttattttaagaccagttgctaatttaaaagcgaaatgtataccagcaaaagaatgagaatgtttgggggtaagaaacagaagacattttgttaacattttatgagagtataattgttattctggtatatcttaagcttcagaatatctgctttgttcctgttatgacatttatatatataaaaaaaaacttctattttcagttggatggatttattgctcgaaactgggccaatcaaagatcagctttgggaagtgctcttgatccacttgctgataaaatacttatcagtatcttatatgttagcttgacctatgcagatcttattccaggtaagaacgcgtcatgcgtacttttgaatagcacagggaagaatgacattagtcagcttaggatttctcttgagagacaaataatttttgttccaaaaatatagttttcaactttaaactgtttccctaattttaaactgttgaactgttttgtcaaactacttgtggattttagaatttatgtccttgttttactagtaaaatcagttgctttcctagtaagattgtttaaaattaaaattgaataaatatttcacagtgccaattcatattactctgaaattttttggtgatacattatgtatttttagtgcctagcttttcaaaagcaatttagttttcctacgtttattatctttattaatatcgtttaatcataagtgagaactctgaaattctgaagatgtctataaaatttcacattatgtagaccctattatgcaatttttaaatcatatatatagtttgtacattatatgaatactttttctgataagatttcatgatttttttgctttgtattttgcatgtgcttttctgattgttcattttcttcttcagtcgtatttctcagtttttctccctcagaccaagttaaactgtttttttcccaagagctaggaatcatatctgatcacactgggacttcccttcactgtcagtctaagagtttgcatttttgaggtttaggaaaagggaaaaaaaaggaagaaagaaagaaattgtatctgagaacaaagaagctgccacatggtccctcggtatcatgttattattgacacttggtagaaagaagtatagtggcatttcagtctagtctcccccaactggaaattatttttctttctgatttttagtcttttaagttctcgtaccaaaataaaaaataaattggactaatgtttacttttatgtgcttctttgaaagttagaattgaggtgtgtatgtgattggggaatgggggtgtgtgtgtgtgtgtgtgtgagttttcttgcctaggctggtctcgaacttctgggatcaagtgatcctcccacctcggcctcccaaagtgatgggactattggcttgaatcaccttgcttggcccctgccattttttcaaagttacattgtattttgatgtagtattttacaaaggttggccagtcattttgctattgaacatagaaattgtttccaggttttttggaattatgggtaatgttgctgtgagttttacttatatgattggtgtaggttgctttccaagctgagacttcccttcactggcaatcttagagtttccattttctttcttctgtgttgagtctgtttttccaggctcccatgtcttcctttgctttaagttactccttttctccagttgttttctgtagaaggatggagtgtggcagccagatttttagaggtcttagacatctcagtgtctctattttgtcttccatacatgattgacagttgaagtaggcatcacttttttttatcttttatctttttttcttttctttttctttttgagacagggtctcactctgtgacccaggctggagtgcagtggtgcaatctcagctcattgcagccttaacctcccagctcaagcagtcctctgacctcagcctcccaagaacctaccaccatgtgcatcaccacgcctggctaatatttgtactttttgtagatatagggttttaccacgttgcccaggctggaggcataatttttaaactgcagatgattttaattcagaattgtgaagaccctcttccatagacttggagattccaacttgctacggaacagtctcttatcatttggataccttttcctttacatgggattgtgtttagtattggaaagcttttaggattttaagaaaatgtgattcctaattgatgttttctttaaaaagttatctctcttaattcattttctaatgcttatatggctacccagttatcctagcactttttatagaaaaatttgtatttttcagactcagtgcaaggtaatttctaagttgttttcttccccattgtttgtctgtctttgcatcagtggcattcttcttattgctttgctaaaagtcttgatatccagtagagtgagtccttccaccttggacattcttagccctttccatttgtttccatttgttacaaattttagaatcagcttttctaagaatcagcaattttccagagaaaaatctgtttggattttgattgggattgcaatgaacttatgatctgtttggaggaatttgcatctttacaatgttaagtcttccagtccagtatctactccattgaggtctgctttaatatctctcaaagttttatagttctctccagaaagataataaacacttttgttagacttattcctaagtacatgatagttcttggtgcttttataaatggtagcttttaaatttcattttctggccgggcacaatggcttgcccctgtaatcgcagcactttggggggctgaggtgggcggatcacttgagattaggagttcaagagtagcctggccaacatggcgaaaccctgtctactaaaaatacaacaattagccatatgtggtggcacgtgcctgtaatcccagctactcaggaggctgaggcatgagaatatcttgaacctgggaggcagaggttgcaatgagccgagattataccactgcactccagcccgagtgatggagtgagactctgtcctcaaaaaaaaaaaaaaaaaaaaattattttcttataactccatgttgatatgaaaaaatcagtactgtttctaatgttgattgttatgtctagcgaaacttgctaacttgtattctaacaatatacatataaatttgcttggattttttacatgcttatttatgtcttgtatgtaattaatgacaacgtatttcttcttttccagtccttttaccctttgtttcttttacttgccttactgcactgagtagtacagtgttggcaaggagtggtgtcaatgtcttattcccaacctcatagaaaagcctttagcgtttcactattaaagatgatgtttgctgttggtttttgtcagtatcctttttcaagttaagaagttcacttctgttgggagtttaagagtttttctcacaattgggtactgaatttttttgtgttttttgtagagatgcggttttgctatgttgctcatgctgatcttgaactcttggcctcccaaagttctgggattataagcataagccaccacccctggcctggatattaaattttatcaaactccttttgtgtattcctatggtcatatcatttttccctttagctgttcatgtgtggtgaattacacatattaatgcaatattagttctaatgttaaaacaagctgcaattcctggtataaatccaacattgccatgatatattatgaagagattgctggatttggcttgctaatattttgtggaagatttcaaattttaattcatgagattggcttggaattcttcatatattcttgttaggttttcatatcaaatttataactagcctcataaaatgaattggggacttttttttttcttccattcttggaagatgtttgattatgaatatttctacttaaatgtttggtagaatctgttaaagccgttgaggcctggagttttctttagggcagagttttaaaataggtaattcattttctttaattgttacgggatgattcaggtttaaagtacatctttttttttaaccttcaaccaactcactccatattacaccttttgaccagtttttaagttgtgatgtttttctaggaatttgtccatttggtctacattataaaaaatgtatcatacggtgtttatggtatcctcattaactttatttatttacttactactccttgtggagcagggctaccctataggcagtgggcccagaatagctctcattaaccttttgatgtctgtaggatatgtagtaatgtcctccttttcctcttgattattttttgtcccttttttttttttttttttcatcttttttgccagaggtttgtcagttttatgaatcttttgaaagaatcagctttgggttttgtcaagcctctctgatctgttgtttactacttcattacatcttgtagttttattttttttcttcttcaggttttctttgctgttctttttcgaaattctttttttttttttttttttgagtgcagtggcatgatctcagctcactgcaacctctgcctcctgggttcatgtgattctcctgcctcagcctcctgagtagctaggattacaggtgtgtgccaccatacttggctagtttttttgtatttttagtagagacggagtttcaccatgttggccaggctggcctcgaactcctcacctcaggtgatcctgaagtgatcctgaccttaggtgcctctacctctcaaagtgctgggattacaggtgtgagccaccatgcctggctctaaattctttagatcaattctgtctagaaataaaatgaagattcttatgtaattaaaaatttttagtagtttttaaaaaaggaaacatgaaaattgatatattttaagtaatccactatatcaaaaatattgtcattttaacatgtaatcaataaattaatgagaatttttttcctatacgccttcatagtctagtgtgtgttttgagcagtgcagctataagtggatacctaacttgtttttcagcttttcttttctaaagattgcatataagactgtatatgttcctctaagtgtcactttcattgcatctcctatgttggttttagtgtgtcattgtccagtatacaatattttcctatttccattattattctttcattgacctgttaggttaaaaataaatatatcttaatttgttgccatttttgtggggatttttttagttacctttttgttacaatttcagtcataataaccttgtgttcagagaacatgctctgtgatttcagcctttcagcccactactgtcagattttataaatattccatgaatacttgaaatgaattgaaatgaatgtatattctgcagttcttgggtatgatgttcttcataggtctattagatcaagtttttaatcctgctttttttttttttgagacggagtcttgctctgtcgcccaggctggagtgcagtggcgcaatcttggctcactgcaagctctgcctcctgggttcacgccattctcctacctcagcctcccgagtagctgggactacaggtgcctgccaccacgcccggctaattttttgtatttttttttttttttagtagaggcggggtttcactgtgttagccaggatggtctcgatctcctgacctcatgatccgccctcctctgcctcccgaagtgctgggattacaggcgtgagccaccgcgcccggcctaatcctgctttttaagtcttctctttcttcactgactgttcttttgcttttggtttgttcagcagttagagtttcctactgtatgtctggttctccagtatttgtctctgtagttgtgattttgttttgtatctttttttttttttttttttgagacggagtctcgctctgtctcccaggctagagtcccatggcaccatctcggctcactgcagcctctgccacctgggtccaagtgattctcctacctcagtctcctgactagctggaattacaggtgcgtgccaccatgccctgctaatttttgtatttttagtagagacggggtttcaccatgttggccaggctggtcttgaaccccagacctcaagtgatctgcccgcctcggcctcccaaagtgctgggattatgggtgtgagcctctgcacccggcctgctttgtatgtcttgaagttatgctgttaaagtgaatatgaattagaattgttacgtcttcttggtgaagtgaatgttttgttatgaagtgaccctctatagctgtagtaatgatttttaccttaaaatatattttgtgggttcttaagctctgctggcttgcttttggtagtgtttgcatgataaatgttttaccttctacatttctgcatctttttagatatcacttgtaaataacatatttatgtaaatatatatgtaaataacatattttaaataaaacccattttgtcttaacccatatagtcttttaacagaagcatttaacccattaatatttattgtgattgatagatgtttcattcagtcttttattttacttgaagtattttatttggcacatatgttttgtcctttttagtatttttaaattatattttctttcactctactagtttgaaagttttacacggtttccatccagttttcctccaagttaaaacatttatctttataaaaatatgatcttaataattctgtactcattctgggcatgggaggcaccttagaattcttgaactccaattatttctctcagcttaggctactgttgtcatacttttatatatttcttaaactcacagatattgtttatacaatgttcatttaaatttatcttcatatttattactttttgctagtctgtcttgtttgatgtattttagacctcccatctgagatcattttccttttgtctgaagtatgttcttttggaattatttttaatgtaggtgtactggtaaattctttttctctgaaaatgtttttattttgcctttattcttgaagaatatttttgttatgtatagaattccaagttggtattagtttttcttagcatgtttaaggtattgctcagtcatcttcttccattgttgataataagaaatcagctgttaatccattgcttttttttttttttttttttcaagacagggtcttgctctgtcacccaggctggagtgcagtggtgtgatctcggctcactgcattctctgcctcccgggctcaagcagtcctcctacctcagccttctgagtagctgggactacaggtgtgtgccaccatgcccatctcatttttatatggtttttagagatggagttttgcctgttgcccaggctggtcttgaacttttgagctcaagcaatccacccaccttggccttccaaagcgctctgattacaggcaagagccactgcacccggccatgttgctttttttgaaggcaattttgctttcttgtggctatttttaagattttctttgtgttttgtttttctcagtttcacaataatatttcttgttgcaagtttctgttttattctgcttgggatttattggacttttcaatctgtgcattatatcttgaagtcagtgctagaaaattctcagccacaatctctttaaatgttgttgttgtgtattctttcttttcttttggggctacagtatacctatgttagacgttctccccgtatccattacatctcagtgggttttttctgtgttagctcattttatctttttgagctccattctggctgtactaatgggtttactatttttcatttcattacctgtctctgtagctgtaccaaatctatttaatcttactttattgtattctgtaactatagaacttctattttattcttttttggacttgctaagttgtcttttatggtttttagttccatgctgaagttttcagtattgacttatccccttgaacatgagttgttttatagactctgatgattcaaaaatcttacatcttttggtagtctctttcatttgttcactgtttctgttgattcttactcatggtattttaattcttcgttattttttttctgtttagatacattctttgaaaaataatttggaggaatatttgattcttatgaacaaggcattactcaccagagaagatttttttgttctaccaggtgcctaggaatgctaacagtctgggaccacatagaccaccaggtgatgagacaatcctgggagtcctgttttactttggcccatcttttctcccaaccctgtgggaatagtcattcatatcctagctgcaggctagaaggtggtttatcagagcccaacttcgagggctctgggctttagctactgtcaccccatcataactgagcttcatggattgattctctttttatctttcagattttcttttaaaaatctttgtttttttttttcttccgaaagattcccccaacattaccattccccaccttccgttgaatttttttggctctcattttgaatttttcaagagctcatgttctttgtcttcattaaaaaaaaaaagttcttatatcgtgtatgaatgtcattcgggatatctatacatacatgcacatacctcatttttattgcatttcactttattgcactttgcaaagtgacattttttacagattcaaggtttggcaaccctatgtccacaagtctgtcagcaccatttttctaacatatgtgctcattttgcctctctgtcacatttttttttttttcctgagacagggtcttgctctgtcacccaggctggaatgcagtggtgtaattatgcctcactgcggccttgacctcttgggctcaagggatcctcttgcctgcgcttcttgagtagctgagactacagaggtacaccaccacacacccagctaagttttaaatttttttatagagatggggtttccctatgttgcccaagctgctctcgaactcctgggcttaagtgatcctcccacctcagcctttcaaagtgctgggattacaggcatgagccacagcacctggtctctgtgtcacgttataataattctgccaatattccagatttcgtcattattaaatctgttatggtgatctgtgatcagcgaactctgatgttactgtctaattgctttgggatgcagtgaacccgtcagagtcatccatgagggttggaatcaacttcttccaaaatcctgttaatcaagagtgaacttaatcgattaatgttgtgtatgttctgactgctccaccaatctgtgggtcccctatcactctccctctcctcaggcctccctattccctgagacacaataatattgaaattagaccaattaataaccctgcaatgtgaaaggaagaagttacatgtctctcactttaaatcaaaagctagaaattattaagcttagtgaggagggcatttcgaaagctgagagaggctgaaagctaggccggttgtgccaaatagctagccaagttgtgaatgcataggaaaagttcttgaaggaaattaaaattgttactccagtgaacacacaaatgttaagtaagcaaaacagccttattgcttatggaaagaaagtctgaatggtctgaatagaagatcacgtcagccaaaacatgtccttaagccaaagcctaatctataatagatcaaggccctaagtctcttccattccttgaaggcacagagaggtgaagaagttgcagaagaaaagttggaagctagccaaccttggtttgtgcagtttaaggaaaaaagccatctccataacatggaagtgcaagatgaagcagcaggcactagtggggaagctgcagcaagttatacagaaaatctagctaatgatgagggtggctacactaaaaacagattttcaatggagacaaaacacccttctattggaagaagatgccctctaaagctttcataggtagagagaggtcagtgcatgggcttgaaagaacaggctgattctcttgctagaggccaatgaagccagtgagtttaagttgaagccagtgctaatttatcattctgaaaattgtagggcccttaagcattatgctaaatctactctgcctgtgctctagaaatggaatagcaaagcacgaatgacagcacatctgtttacaacatgatgtgctgaatattttaagcctacaattgagacctactgctcagaaaaaaaagattcctttaaaaatgttactgctcattgacaacacacctggtcacccaagagctctgatggagatatacaagaaaattaatgttgttttcatacctactaacacatccattcttcagtccttgtcattttgactttcaagtcttactatttaagaaatacattccccaaggctataggtgacgtagatagtgtgattcctctgatggatctgggcaaagtaaattgaaaaccttctagaaaggattcaccattctagatgccattaagaatattggtgattcatgggagaaagtcaaaatatcaccattaactggatttttggaagaagttgattccaacccacatggatgatttgaggggttcaagactagtggaggaagtcactgcagatgtggtagaaatagtaagatagctagaattagaagtggagcctgaggatgtgagtgaattgctgcaatctcttgataaaaattacctgagttgctttttaaagaggtttctagagatgaaatatactcctggtgaagatgtcgtgaacactattaaaatgacaacagaggatttaaaatataacacagacttagtggataaggccgctgcagggcttgaaagaattaacttcaattttgaaggaagttcttctgtgggtaaaatgctatcaaatagcattgcatggtacagcgaaatcttttatgaaaggcagagtcaatttatgtggcaaacttgattgttgtcttattttaagaaattgccacagccaccccagccttcagcaaccaccacactgatcagtcagcagctgtcaacattgaggtaagatcctctactagcaaaaagattatgactcattaaaggctcagatgattgttagcatgtggtgtgagtgtttgtgtgtgtgtgtgtgtgtgtgtgtgtgtatatatatatatttagacagtgctactaccgtacacaaaatggattatagtgtagacataactttcatatgcactgggaaactgaaaaattcgtgcaactcactttactgcagtattagctttgttgcggtggtctggaacagagccttcaatgtctctgaggcatgcttgtatttatttatttatttaaaaacctctatattggttgtgtttccttcagattctattttttgtttgtttcggcctctcttttgtgatggagactttattgaaatgtatggtgatccttggctgctaacttatatttgaatgaggcatgaaaagttcattgggagctccgtaggcactgggtgcagggcctgaattctcagtatctttaagtctattctgtagatcctagctctccatctgctgcttgggaagtataaatgccttcccaccagggttttgggagctaagctgtgggaggaggctgggatctcagtgttcggtatgtagaccttcgcttgatccctattgcactccagtgccccttggttcagagagtaacatgtggagttggggttggtaacttttcctgcaaagggccagatagtaactatttcctgctttgtgggtaatgtgatctctgtcacaaccactcagctttgctattgtagcgtgaaagcagccatagaaaatatacaggtgagtgtgaatgtattccaataaaattttacttatagacactggaaattgaatttttttttttttttttttgagaaggagtttcgctctgtcacctaggctggtgtgcaatggcgctatctcggctcactgcaacccccgcctcccgggttcaagtgattctcctgcttcagcctcccgagtagctgggattacagccacccaccaccatgcctggctaattttttgtatttttagtagagacagggttttaccatgttgaccaggctggtctcgaactcctgacctcaggtgatccacctgcctcggcctcccaaagtgctgggattacaggcgtgggccaccatgcctgtttttgtttgtttgtttgtttttgttttttgtttgtttgttttttagacagggtctcacactgtcacccaggctggaatgcagtggcgcagtcttggctcactgcaacctctgcctcccaataactttcaataagtgattattgtgcttcagcctcctgagtagctgggattacaggcatgcaccaccacgccgagctaatttttgtatttttagtaaagatagggttttgccatgttggccaggctggtctcgaactcttggcctcaagtgatctgcctgcctcagcctcccaaagtgctgggattacaggtgtgagccaccccgcccagcctggaaattgaatttcatagcattttcatgtgtcttgaaatactggtcatctgactttctttccccccaatcattaaaaaatgtaaaaatcacgcttagccacagggagccacagccctagcagtaaggtgttagggaacgcttggggcggggatctaactgctctttatatggacttctgagtttctcttgtgggaattcctttctaaaggacttaggttttggctcttctcaccttattactaataagcctggttaaaactttgaaatctgtctcctctacttattctctttgtgtttttatatcctttcatttctttactgtcattttaggagaattttggaaagtagaatgatgcatatatgcagtcttgcatgttcctacttttatgctgcattttttaaaagtcacatctaccttcattttaatagctttgtttctctaagagtaagaaatatcttctgcaggattggagatcaagaaatttttttgctttcttccttcgctagaataataaatcattctgctattctttttggtctttttatgggagggggagaaggatgaaaacaaattctttggcttatatgttaattagagagtggaaggcaaatccaagttaatttctacttagatttatgtccactgaacttagatctgtgtgtatttgttctgccacatttttgtattattttatttttattattttatttattttgtattattatattttgtattattatattgtttctggtttaccatctggtaaattcttatttctggtttaagtcaatttctagaatattctgttaagtttaccgttttcagtgtaaaaacctatagtgttgatgttaaccatttttaatatgtaaacgattttatgaactatttccctttaatgctaataaaacttgtccatgatgtctggctttgtgggctatgtgatctctgttacagctactcagctctgctgttgtagtgtgaaagcagccacagaaaatatttaaattagtgagtatgaatgtgttctaataaaattttacttacagacactggaaatatcattgcaaatattacccatgtttcagagttagcaagtagggaggaaaacctggagaaatccttgacacattttacactgtcctgcccatcactttcttactctagtaggcaaaatgaaaactgttttaactctagaagagaagaggagtccaagagagaaagccaggaaatttggtaacattttttaaccacagtaggagcccatatccttcagttggctgaggcctttgagaccacctggtacagaaatgttctagccttgctgtgcataggagtcacccagaggagagctttcatctaggcttttactgagctctctcaaggtgacttttggatgggcagtcagtttggggaacccttgatttttttttttttaatagctctttcccctaccagatggttacagatggtaaactgagtccagagatgctaattgttaggtcacactgttgggttggaacctaatgcgctgacccaaacatagtctgaatttcataggcctacattcctggttaaatgcagtcttgcatgttcttccatgcatactatacatagattttaatttgcatggatttgctgctcttttttttttttttttttttttaaagacagagtttcactcttgttgcccaggctggagtgcaatggcacgatcttggcttgctgcagcctctgcctcctggcaagcgattctcctgcctcagcctcccaaatagctgggattacaggcatgccaccacacctggctaattttgtatttttagtagagatggggcttctccgtgttggtcaggctgatctcgaactcctgacctccggtgatctgcctgccttggcctcccaaggtgctgggattacaggcatgagccaccgtgcaggtttgctgcattttaaaagtgtgattgttgttagattttgccagctaatgattgctacagaaaagtttgtttaccggtacaaaaatgttcctaaaaattatgactcactgttttcatgcttggctcatatagccacatcttgtttgctccaaatgccgtgacttgagtggataagcattttttctttggaatagtattatccatcaaggactaggccaaggatcaatatgtacatcatagctataacagcagagatttaaattttaaatctgtaattagagattttcttcagattgcagagccaattgaatgtcaaaactggagaggaccataagtatagcctccaataattcataaaagatttgtttgaaagtattttggaagggatgttcatgatcctttttatttttatctttatttatttgaaatagtttggatgctgttggaaccgagtgtttgaactcaggcttttttttttcccccctttttaaaaataataatttttttttcttataaaagatatgttcacagttaaaaactttctatggtgcagaaggatataaagtgaagcaagttctctgccatctcattcccattcagtaaggaaataggggttccttgggtatttattttaaaatatccttctattggctatggctctgggaccatggtgtaaaatctgaggaatgatgacaaaaatattgacaagttgcattcattgaatgggcagggagaaaaacagcaatccctgggaaggaactggctggataagtatacaatatttcacgctgggcacaatggctcatgcatgtaatcccagcattttgggaggctgaggcaggtagatcgcttgagctcaggagttttagaccagccaggacaacatggtgaaatcccttctctacaaaaatacaaaaattaggcatggtggcgtgcatctgtgctcccagctacttgggagggtgaggtgggaggattgcattgagcccaggaggtcaaggctgcagtgagccgataccgtgccactgcactccagcctgggcaacaaagcaaggctctgtctcaaaaaaaaaaaaattctgtttctctactagttgcacataacagcaaattttactcttcagagaatagtctaaaatgcagaacaagcaatcaaagctcctgagatttcagaagagtttgaggcctcccacatccttctccacctctttataatctcttttcatgtaattctgagtatggtgatcttttttcaaatgtgcagagcttagaagtagcaaaggaggagatagcgctgagtagagctgatgctgataactgcggactaatagcttaaaaacatgcaagaaaaaaacacaaacagatgagaagatcagcatactgaaaggcagatacagacttcaaagccatagtctgtacttcactttgttttgagggcgggttaaagaagaatataaaaatcagtagtttgctataggggaccctaaaccatcgataggtgttcattataaaatttctatttgtgaaaacagcagtttgtggtaaggctgaatgacatattattgtattcataatgcatattagtactcttcagaatcccagttaaaattattttatgtttgattttcagttccacttacttacatgatcatttcgagagatgtaatgttgattgctgctgttttttatgtcagataccgaactcttccaacaccagtgagtttgtttccaaaaagtattcttttagcattatatatgatttaaggaaaaagcaaaaagacatatttttgcgtcaacatcttttcaattgatggcacgtgaaacccagactagccagcccctatccctagaagcaaattctttaaaggtgtttcatataggtccaggccatattgtctaatttaacctctaccatggatagtctagaattggttttaaaaatcacagttgtatgaacatgggatggtttgtttgcatatttattcacaggctctataaatacttgaacacatacgcatagcatattaacctcttttggctcccaatgtactgaaaatagagcagtagagcagtattttgttcattttattttttaattcaaaaaagaaaatagtgaataagggaattttgagtttagtaaaattttataaagcaaactatatgataggtattgtgttcgaattttacagcaattgaaaaatctatacattttttaaaatcaatattcagtatatattgaatgtatgatttataaagttatgttgttacctaagtataataacaaaatgtctattttaaataaaaatgttattttaaacaataagttaattactttatcttttttggtcctctgccagcgaacacttgccaagtatttcaatccttgctatgccactgctaggttaaaaccaacattcatcagcaaggtaagagaatgcaatgttctttgaagttattcctttgtaaatttttattatacaggatataaaccttagtcaagaacagctgaaaatgagacaaatttaaatgcattgagtatagaggctagagagtagcgttgggcaggcagttttaacctagtttgtcctccgtgttttttggatcatccttatacatgttgtgccttgagttggtggtctgagagtttaagctctgaatg[131 bp omitted]tgccttgggttcccaaattattgggattacaggagtgagccaccaagcttggctgtaactgcttcttaattcagtttcacagattatgaagagtccctggtggtttcactccctccttccctgtggtgaaaataccaaatggctgttcattttcaggattgatagttaagtggaaagggataggaaaataggaaaaagttttgttcactaataaacaactgctactcttagttgtccattctgttttcccgagcattcagggcaataagtatatgccagtctacctctcaagccatatttgtttttctagtagctttgataagttttctcagttcattcttttgtcccatctttaatgtcaaggatttaacaggttaagaatgcccatcatttttgggagagaagggtagttgcttctatacagaactccctggggtggactttcatctacatgcatagggtttggggtttttttgttgttttttgtttgtttgtttgtttggcttcaagtgacttgtgtttatattgtatggcaatttgagtgtagcgttacatggaaagtgcttaaagaggtacggggacaagtgccttaaacccttataggaagcccttaggataaaatttacattttattttattttatattttatattttattttattttaatttaatttaattttattttattttattattttttatagatgaatttttgctcttgttgcccaggctggagtgcaatgacgcgatcttggctcactgcaacctcctcctcccgggttcaagcgattctcctgcctcagtctcccaagtagctgagattacaggcatgcgccaccacgcccagctaattttttttttgtattttttagtagagacggggtttcaccatgttggtcagactggtctcaaactcctgacctcaggtgatccacccatctcggcctcccaaagtgctgggcttacaggcgtgagccactgcgcctggctattatttattttttaaatgaagtagaatccttctcatttggctgcagaacgggtgatagaacagaggtgctcgtctgcttcactcgctttttcatactttgcagactcttccatggagtgcttctcatgatgatagagggagtctccagtgtatttcttgttctattttcttttctccccagtgctgtcttttagtgtagggaagcctactcatttcctccttgagagaggttcttttatggagatgagtgctttttctttgaaacggggtcttgcgctgtctgcccagccttgagtgcagtggcgcaatcatagctcactgcagccttgacttcccaggctcaaaatatcctaccacctcagccccccaagtagctgagagtacaggtgcacaccaccatgcttggctggtttttaactagctggtttcaaactcctgggctcaagtagtccttctgcctcagcctcccaaagtgttgggattgcaggcatgaaccactgcatctgtcctgagatgagtgccttttaattttctaacctcacaaggtttgacaggtaggcaagaaaggagcatcggataaggccccaggaaatctaggttccagctttggttctgttgtctgctgtgactgcaggcaagtcacctaactcattacccttttacccatgaagaggtagcttagttattttcgtattccattttaatgggcagttggaaaaaaggcaaataattttgtaacatttttgagttgctgtgagaattcaaggtagtggtattttctgacagttgtcattactcttgctcttaagggcagctgtgcagacagatgggtcagttagtgaagctgacccttttgtgtgtgctcacctgtgaatgcaagcttattgggcagggatagtgtagatgaacagcaagcatgctgagggtatgtcatgttatagtgtgatgggctgtgcttttgtcttgaaagcttgaaataggatccagttggcactattcacttagaactttttctttttttatttaggtgaatacagcagtccagttaatcttggtggcagcttctttggcagctccagttttcaactatgctgacagcatttatcttcagatactatggtaagctaaatttagaatcactctcttagaatgtcaacagaatgacttatggtgatagccctagaatgaccttgttcttacagcatttgttgagcactgactgggtaaagctgtggctatatttggtgattgataccattgttaagacgcttcctgccaagtatgagatggagaagttagctttcatacaaattaaaagggataaaaggtactgataatgtgttaagggttttggaggaagagataacttcgtaggaagaagagggacagtttcaggaaggaagtggcatttgttgcatgaagtggattgtgtgtaggaagagactgagaggagaccactaggtgaaagacagggcctaagccaagagatagagtgtaggagagagggtagggaagctgagtccagcctgttgaaaagggtgttgtaggagggaaaactggagagaggagtttgaattttattatactaattgcttatttatcatcttaaaagtgtgtcaaattcacgctttcagagttcaaaatagtcacattgacattggagtattatattttggcacaattttaactagaattaaaattatcttgcttggtacagtctggaccagaaagtggtggctaatcacagtcagttaagccaggcagtcttttaaaaaatgacaactactctaaactttttattttaattaaaaatatttaagtgtacatttatcccagttcatcttataccttctgatataggatgaaggctttttgagtgtaggtccatcagtgggagttttttctttctcggataaactacatccataatacaaacctctctgattttcattttttacttctttaaggtgatgcaagaacttaaaacatttgcaaagcagtctaagaactgtttagatattttccctagtcttttcacaatcatcttgtctatttattttgacagtatttttttcccctaggaacccatgaagagagagacagtattttttttttaatcaagtcacctttattgagtctttctaaagcatccaatgtagttttcagaaatagcaattaaaaaaatttttattttatttttttggagacagggtcttgctctgtcacccagcctgtagtacagtggcatgatcatagctcactgtaaccttgaattcctggcctcaagcgatccttcagcttcagcctcctgagtagctgggattacaggcatgtgccaccaccacacctggctatttttttttaattaattaatttatttatttttgagacagagtctcgctctgttgcccaggctggagtgcaatggcctgatctcagctcactgcaacctctaccacccgggttcaagcgattctcctgcctcagcctcctgagtagctgggattacaggcgcccaccaccatacctggccaatttttgtatttttagtaaaggcgggatttcaccttgttggtcaggctggtctcgaactcctggcctcagttgatccacccgcctcagcctctcaaagtgctgggattacaggtgtgagccactgtgcccagccactaattttttgtattattattttttgtagaaacagggtctcactatgttgcccaggctggtctcaaactcttggcctcaaacaatcctcctgcctcggcctgccaaagtggtaggattatagtcatgagccactgcgtccagctagaaatagcaatttttctaacacatatatttcattggtttatgtatgaatttagaatatcaaagtggcatgaacaggttcaagatccaacaaaagggaatcttgattctgcctcacctaataaaagcagaagtgcgtgggcgcactaaaaagtaatctagctgtgggcatgcagcatgccatgggtgtcaggtgatgtcatttcaaggagaatccggttaagggtagtttggtaaagaaagctgaaatttatttaaaatgactcaggtatctttagaattctcaaaagctgcaggaaataagagtctggtaccctgagaagcatggggcagtagaaagagcatgtgggctttagagttcaaacgaagtcaggctcaaacatagttctgtgataagccctgagcaagttacccgggtcttccatttcccccttctggagaagtcctttggaggatgagtccttctggaggatgagtccttctggaggatgaagtccttctggaggatgagttcgttgtaagaataaaatgagaatgtaagacacctagaggatgcccgagtaaaaaatgacagttgctagtagtagtaatttgtagggctcattatctagaataattttgtttgacgttactaattaaaatgaactcttaaagaaaagcagtgtatttagactcttgtagttaagaaaaattacaccacagagccctttttactttttaaattcatttttacattttaaattcattgcatgtattcattatgattcccgttgctactattttttagacttgacaactacattttatttcttttcttccataaaaggtgttttacagctttcaccacagctgcatcagcttatagttactatcattatggccggaagactgttcaggtgataaaagactgatgaaagtcatccctcactgttagtaaggaagcagtatacatcaatgggaacagggcccatggaaatgtacaggagtttccctattttggtgttcagcttgaaaaaggacttgtcagaatcaactgtgtcatcaaaatttaagtaatgtgcattgaaaataaggttgatcatgggaatatgcagaatttccaatgtatttttaaatacaaataaaattgtaatttagaatttttaatcttaggtttcttgattaatttataagagatcaattattgtcagtcttttttgtatgttttttaaaaacatagtccagagcatgggcagaattgacacctctcttttaagtgaaatttggattgctcacaaagcactaggaaatgtcatggggttcaaatatatatcctacacaactgggcaatacatttttgtttgatttttaggtctgtgtatacattaacagttcatgtaattaatacctgatcatttgggataatgaaagtgaagttagttgtagatgaagtaaagttataaaagagattaaaaatgcggtaactttttaagataataatcatacagaaggtatgaagttcattttcggtagtcttccaacctctcaggtgcctaataatttatgtttgaggataacaggtaacaaagatagtcgagataggagaacgtgtctattagtctttgcatctaaaaggcagtgagttacgttcctgccttccactgtgtttctgacatagcaatgtttgtttgatattggaacctggattcatattttatgtaaataatatcaagctgtatatttttcaaaggttttttaaactttggagactctttcttttgttaagcagttaaaggaataaaagagctggaaaaaaaattgtaccttcaactcaggttgttccatataacatacgtattctctgctgttacgtaagttttccgattcacagagtccattcatgtacatcacttacacttaaattgtaaaaataattagtctgaccatctgactttaaaagactgttgctacacgtacatcatgtttaggagaatgtgggatatggggaaggggagaagaagacagtccagtggtgactagttgctgctgcttaacctatggcctattgctgcccattgtccctggttttaatccaagcctattatggaatactgcagtgagattatccattctcagcctgttgagctgcattaaattagaatgggaggctgtaagtaaaactcatgcctcttggccaggcattctgcaccagcgtgtccctctgtggcttgctggtcctggttgttctcagactggcagctgagctgcgcttggcttgaagcatactgaagcctgcagccagggacaccgccattgaatcagatggagggggatgaaaaagcagagaagggggcatgtggctggctattcttgctctctggagaacagcttcattgttaggagtagttaggctgaaagtggacttcccactgctgagccacccaagaggcacactgagcattagtgacgggtgagccacataagaataatgtttaaaaaagagaggacttgaagtagctatgcgaaaatttagaactttgcactttgttaacgcttatttatggtttagtgttgatgccatttggagtgacctatgggttggacccatatctttttattattaaggtctcaatctggctctggttaataaacgtttcccgcttcatcccttaggaaaatggtccaagtctcctcaggcttttggatactgaattgttataaaacacatcaattctgccagtttataaaacactggaattgtattagacatgtctgagtatgtacttgtttatagactcaaaacatgatgaaaattcatttcattgtcttcactgaatagacttaaccttgacagtaagcttaaagcattagtgtcatttaattacatgtctgaggaatttatgctaactagattttgggcttttgcagcgaattttagtcggggcctcattcctgagcccaagtgaccctttcacctcagcttcccaagtagctgggattacaggtgcacaccaactgtgctttgcagttttgtttgtgtgtgtgtgtgtgtgtgtgtgtgtgtgtgtgtgtgtgtgtattttgttttttttacaagcccacaacatcatagctttgcagtttttaaccaggagctggtggagatctttgaaatcatttaggccaattcttttagttacatttatgatgaaactagggatctaccttaaagttttgggaagctctttcaaaacttcagacacctagaaatatatatagtgcagttcagttttagtttctgcagcatggtttggaaacaaaagatacataggatttaaactcgatttgttttcttcttacagtagaagtaaatgctcttgtggcttgaatcgcatctcccaagaaagatacgttcacgttcaaacccccagtactgtacatgtgaccttatttggaaatagggtctttttagatgcagtcaagatagaattagatcatactggattacagtgggccccaataactaggtttttttgttaaaaaaaaaaaaaaaggaaatgtgaacagagagagaatgccgtgagatgatggagggatagattggaatgatgtctgcgagctaaggaatactgaggattgctgccaaccatccgaagctgggagaggagatggaacaactccctcggagcctccaagaggaaccaaccccactgatgctttgatttgggatttccggcctgaactgtaggaaaataaatttctgttcttttaagccatttttaccagtttgtggtaacttgttacagcagctgcaggaaattaataaatgccaatgttgaaaattaaaatctagaaatatggctctaattataatttcatagaatcattttttcccctgagtttcccctgagtttgcataaaagtgaaaaagtagaggacagagtagatgcctcccacatgaagacacagattattaaggcattgtttgatgcaattagggcagagaaacacgggcttctagctagagcctcgggttctcttttgctcatttcttccctctaattaagaaaaaatatttccaaagtttattatgcctcctaaaaaatgaatttataattcatttgtccatttagtcttaggtgaaatgcagtaaacactaacttaaaaggacagcctttccctgtgtttgacaaatgttcccagaaaactggttttaactgtaaagccgggagtacattttcttgtcatgtcctgaaatggaactaataaacccagaaggccttaggaagcaaccattagctctcccccttaccctagttctcaggaattggaactggaaatccactggaattgatttcttgaataacagagctcgttgtgtcttagagcttgaccatgaaggagcttccgctggaaagacctgaggatgtgatttctaacatgatcaaagaggctgggttatgcaacttctctgtttcatcccttcctacgtccatacactattctactggatagagaggcactgactgctgaaaaccgcaaatgaaccaacaacacacaagaaggcctggcggcagtggggagcgatctggcattgaccatcaggtttctgggaacagagttaagtagaaggaagggagggcagcagttccttggacccagacactcagtgtggcaagttccatgtgtgctcaaggcattctggcttcacgggaattagaaaccctaggagcggatggggtcgtttttgaccgtctgtgtcttcctttttgcgctcagatccagttcgatgagacgcgttatcccagaagctgggctaactgacggtctggagccccagcgggtaatcatcaaaggccgggtttttgtaggccaccaggtgcgtgtcgcagcgctgcaggcccagcgtctggccccgcctgcagagacatgcggacagcaccacggtgctggcgagcaacaggccgctggcggcgcacagcccagagagcaggagcgcgaagctgggcttggtggtgaaggcggcgcacgggctcctccagcccgaagaccgtggctggctcaagcccgccctgttggccgccagcacgcacacgcggtaggtggtgcccggcgacagcccgtacagagggtgctgccgggccgtggcgtagatgacccccaccaccgactggttccccgcccagccctccgcagagtagcggatctggtacccatgcactaccgagttgggggcacaccagtggaccagcgccgacgtgtccgtggtctccgtcaccccctgcagcctgggcgggtctgggatggtgtcttccccgctgaggccggggcaccggcaccgccaccgcctctgcagctccgcgcacggggtctgcaggtgcttgcagggatggtaatcacaggggacgtcctggtgaggcgttcccacctcctccttcctcccttcctcctcctcactgtagtcgtccagcagcaagactggaatctcgccctcggaaagactcgggttgggggcttggggtgtggcgtgtgtcctctggccgggctgaggcgagcttatgctgcggtcccacgaggtagggaaggggcccaggagcttgctggccagtggggtggaggcagctgagatatcaggctcaaggacaagctcgggggcatgttctcctcggtgctgggtcctggtggtgctggcagccctggggaaaacgctggagttgctgtgacctgctacagagttggtcgtggagggggcagtcccctcccgtgcatcgctgtgcggccatgcagctatcgtgcgagagcccacgttaggggccttggagacactctgctggtctcccgcaggccgggtggcgggggctgcgctgggcgcgacggtggtaccctgtgcgtaggtggagcggttgaagcaaggtgggtgtgaagccccgagagtggtgctttggtcggactggcacactccgggcagctgggagagtgacagggaggctgagaaggggccgctggatcccgcagctggcgcgcacatagtgtctgctgccctggaggggaggccaaccagttagaagacgtctggcttcagggacacttctgcgcagagctttgaatcctcattgccgacgtcaccccctgccaagcccatcaacgcgtctctgccaggcaccccagggcacacacgccgcacacacacatcacctcattgattctggggaaacctttggaggaagctcctgtcctcactcccactgggcaaagaagcaaacagaagtttagaaggaggaactaattgcccaagacaccatagctagcaatggcagagcctaccccggggcaagcactgagaaggagtccagattctctgagtgtcatttgccattttgttctcacctgtctgcttcctggcaagaaagcactagtaataaaaatcatactcgggccggtgcgatggctcaagcctgtaatctcagcactttgggaagctgaggcgggcagatcacaaggtcaggaggtcaagaccatcctggctaagacggtgaaaccccctccctactaaaaatacaaaaattagccgggcatggtggcgggtgcctgtaatcccagctactcaggaggcagaggcaggagaatcacttgaacctgggaggcagaggttgcagtgagctgagattgcaccactgcactccagcctgggcaacagagggagactctgtctcaaaaaaaaaaaaaaaaaaatactcatactagctaccatttctgagtgcttcccacgtgctaggcgctattcttcacactccaatgtgtcaactaatttagtctgcactacttttgcagtagactctattaccccattttacagatgagaaggtagaggccaaagtaactcaggtgaaatagctcagctcaaatcaacagtagtaagtagaccaggtacagtggctcatgcctggagtcccagcactttgggaggcccatgtaggaggatcacttgaggccaggagttggagaccatcctggtcaacatagtgagacctcgtctctaccaaaacaaacaaacaaaaacttagccaggtatggtggcacatggctgtggtcccagctacttgggaggatgaggcaggaggattgcttgagcccagtagtctgaggctgcagtgagccatgatcatgccactgcactccagcctggatgacagagcaagaccctgtctctaaaataaattaataaaatagtagtaagtaggatgaagctggactctctggctccagagcctgtagtctcagcttcatcattaatactgtgatgagacccttgactgcaaagggcccaggtgcttctctttggagggaatgtggggttggggggcagactgagccccacctcacagctgggcttgggtgggagatgagaaaagaatcttggccgggcatggtggttcatgcctgtaatcccaactctttgggaggcccagatgggaggatcacttgagtccaggagtttgagaacagcctgggtaacatgatgagactccatctctacaaaaagattaaaaaaaaattagccgggtgtggtggcttgcacctctggtcccagctcctctagaagctgagtaggatgatcgctgagcccaggaggttgaggctgtaatgagatatgattgtaccactgcactccagcctgcgcaacagagcaagaccctgtctccaaacaaataaacaaaaagaatcctgcagaatggtggtgaggggggttgcctcccaaggtatagtgtttacttggtggaaatggtttgaaagtgctcaggactgggggtgttcccagccccccagctcccactgtctcctggtggccagcctaaatgtggctcctcactgcaaaaacagctctttctagccaatagtcttcataggaatttcccaagagagctctgtaagcccacgggcctaggactggataacccgggagcaggaggccaggctccatcttgaagattcagtagaacccagtggttaagccagactacacttcccagcctcccttgcaggtaggtgtggctcctggctaatgaatgtgagtggaagtgaggagtaacacctcccagcctggctcaccaaaagcctccaggtctgctcctccatgctctttgccccttctggctggctggaatggaggcagcttccatcacctggatccctgagtatgactacatgggaaaggctgcccagcccaacatggccaaagtgccaagcatggtcacatgagcaagatgtaagctggagaacttcagctcctgaaggctgaccctctgccctcagccatctgctttgtaaatgtgttacctgcttaggacagttctctttgcatccgtgaggagccaagacaagtcacaactgcaagtgagggggttgccaaagaggttgatcgataggacctgggaggaatccagggtccaaggagggaaggaactcaagttgcagctgaaatacaaacaaaaaaattaattaagtcaggtttttacaattgtatcaaagatattcccagagaggcatggtgtcagaaccatgcccatggtatcagaagcattctgataggggttggagaataccgctttgggcaaaactcttaatgacctcgaacttcattttttgtcctctgttgtaaaatggagataccaacctaacaggaaatattatgcttcatatcaactggggacaatattccttcatatcaactggagacatagctagaatggaaatgttagaatgagagttcaatcagtatttttgtgtgtgtgtggaaaggaaatgcttttctttttccctgaagtgggaaaggaagaggattacattttttttctttgagtaacaccgttgagtcctttacttacattgtctcatatcaactggggacaatattcccatgactgatcgttgtatcaaaaagaatgtgtgttggctgggcacggtggctcatacctgtaatcccagcactttgggaggccaaggcaggtggattatttgaggttaggagttcgagaccagcctggccaacatggtgaaactctgtctgtactaaaaatacaaaaattagccgggcggtagtggtgcacctgtaatcccagttactcgggaggctgaggcaggagaatcacttgagcctgggaggcagaggttgcggtgagccaagagcacaccactaccctccaggataggcaggagagtgagaccctgtctcaaaaaataaaacaaaacaaaacaaacaacaacaacaaaaacacacacacaaaaaagaatgcatgatgataaaagtgtttgtaaatgcaaatctccacatacaaatagatattgttattatggaccagtgttattgcactgtggctggtgacactcaacaccagtcctttggaagatgcctcatttaagtgcatcagtgaactcttgctaagtagagagtatcctccaaacttagtaacttaaaacaataaatatttattcctttgcatgattctgtgggttggctcagtggttcttgtggtctggattagctcagctggggccagatgatctgggatggcctcatgtgtaagcctcaactggctgtgctgggacttctctccatgtgtctgtcatcacccaggaggctagcctgggcttattcacatggtagtggagggatccccaatagcaggagagggcaggccccagtgctcaattgctttctagtttctgcttacatcacatttgctaatatcccactggccccaagcaaatcacaaggccaagcccagcttcaagaggtagagcaatagactccttgaaatatggggcctggtgcaatggctcatgcctgtaatcctagccctttgggaggccaaggtgggaggatcatttgaggccaggagtttcagactagcctgggaaacatagcaagaccctgtctctacaaaaaaaatttaacaattggccaggcatggtggagtacacctgtggtcccagctacttgggaggctgagatgggaggattgcttgagttagaggttacagtgagccatgattgtgccactgcactccagcctggggagcagaactaggccttgactctaaagaattgaaatttaaaaatatatatataggaggagctgcagtcatgttgcaaagagttgtgcctacagggatggggggaattactgaggccatttttgcatagagtctaccatacctagcaatggcagatctgctcctggctcccttctctttctcacccagagtctcacagagtgtttggccttgactttctcgactccctgagtctcctggacctcccagattttacctcatttacatgtactcagtgataattcatcatgggcaatgggagctgcattttacattcaagtctcttctgaccaaaggctggctttcctcagtctgcctgggaacctgccctttactactctggagaagatgctgttgttctgggaaaggaaggacatgtcacccacatctgctctatcacttctggccagtaggaaagtgacagtcacccctgggacaccagatttatgtatgtgccatttatattaaaacttaagccatatgtgcatatacaagtgtatatatgtatatatgcgtgtatgcttgtttttgcagattttacatagctagaatggaaatgttagaatgagagttcaatcagtatttttgtgtgtgtgtggaaaggaaatgcttttctttttccctgaagtgggaaaggaagaggattatatttttttttctttgagtaacaccgctgagtcctttccttacattgtctcattaacatcactatgacgacttagtgaggtagacagcatgttacatgttctacatgtaaagaaaattattcttaggggaaaaggtacaattcgctttggtggttctttctgccacccagtgccacctacacgtgatgaagtcccacatgctgaggaaggagagagcctggctggttcctgatgcatgtcacatttgggtattctctacttctgatagggccctagtgtggaagaagtctccatttgctctcctgaataatttctattggagaattgttaatagaaattgcagatacttccatgtcactttccagtagttccatgtcatttacaatcattaaaatgatgaaagttattagacttactggtagattttgtcacttaaggtgttaaagaagcagacacacatacacacacacacacacacacacacacacacacacacacacacagagacacacaccactcttctggtaagagtggaccatggctgggagcggtggctcacacccataatcccagcactttgggaagccgaggcaggcagatcacgaggttaggagatagagaccattccggccaacatgatgaaaccccgtcttaactaaaaatacaaaaaaaaaaaatagctgggtgtggtggcgtgtacctgtagtcccaactactcgggaggctgaggcaggagagtcacttgaacctgggaggtgaagattgcagtgagctgagatagagccactgcactccatcctggtggcagagcaagactccatctcaaaaaaaaaaaaagagtggacccacaggcgtcacgagactgtcaaaagggcccataatataaatgaaaataagacctccctggtctaaaatggggcctgtgaagatggaaacatctatcagaaggcagtaaggaagatgggagacgaagaggacttgatctagagttgccctaaagggtcaaagggaagggggctggcacaggggctgttggggatggaaatgaaatgagtcctggggacttgactcctgcaatgactcttccacccctttcacctggctcccttgggaatgaatgtcgctgatgtcccacattttgccaaatcccgtggtcaccccattctcagctgactagggctcctgatggttttgccaaccactccctccctccttaagcactctcttctcttgacctccaggacatcacattctcctggtttttctgctactccactggtcataccttcttgatctcctttcctggttcttcttcatcccgatgttaaaagttggggttcttcaaggctcagttctgggccctcatctctctgtactgtctctctggtgatctcatgaatttctttggcttcaaatatcatctttatactcccaaatttatacctctggctcagactctcctcctccaagcttcagtctgatgcagcattgtgtttaaggtatcagatgtggagccaaactgcctgggctcaaattctgattctgctatttactagctatgtgaactggggaaatgtatttaacatccctgtgtctcagttttttcatctgcgaaatgggaataatgactgaatcctccctatctggattgctgcaagagtaaatacttcaatatatgcttagaactatgcctggcacagtacaacaggttcgtgttattattactgaacatttcccctggatgcctcatagatctttactatccagcaggcaattagatacgtgattctggggctcatcagaaggccttggctggagatactcaactaagcatcctcagcacagagatggaggaggacgcattaggctttagggaaggggatggtgctggagtagtgcatagggtgacaaatgacctgcaagacagttataagtggaaataggcaaggacattaagaaggcctagccaggaaggctggagaagcaccagggaaacatctgggggccaaagagacagagaacatcaagagggaggaaataaacaataggctccacagacgtaagtgtccactgacttggcagctgatgtgggtggtcagattgcagtgaattgacaagtagagggatgagaggaagtggttatcacttctcaacctgggatgcttgctcttcttgggcctggatggcctttctcttctgacattcacccggtgagcttggacttgccttttgagatatggaccaattatgctgttcctgaagaagcctctctgatccagtctgatggatcattacccccacctgtcttataacacagcacatggcgtgtgtctctgctatggatcatgatgtgttatgataagtggcagatatctgctacctatactgaactgtgagctccctgaaagcagtggccatgttgtcaacgtcaccatcaccaaagtcatcatgaccatcaatatcattatctttattaatatcaccaccatcacatcaccattgccactgtcagtgttctcaccaccactatttttttgttttgttttgattttgagacagagtttcattcttgttgcccaggctggagtacaatggcgcaatctcagctcactgcaacctccacttcccaggatcaagcaattctcctgcctcagcttcccaagtagctgggactacagacacatgccaccatgcccagctaattttgtatttcttttagtagagatggggtttcaccatgttggccaggctggtctcgaactcctgacctcaggtgatccacccacctcggcctcccaaagtgctgggattacaggcatgagccatcatgcctggcctcaccaccactattatatcatacaatcatcactatcctcgcattataattagcaccaacagccttcatcatcaccatcaccatcactgacatcaatcagcatcaacaccatcaccatcactgtcatcaccatcagcatctccattataaccaccaccatcatcttcactaattttagaggacaaataccatatgccaggcactgagctaagtgctctacataaaccatatactttttttctcatgaaaagccccaaagcaaacttttattgtcatagctctatcttacagataaagaaactgcttgatatttgtatcctggcactttacacagttcttgggtttttatcgagctcaaaggagtctgagccagagatacaaagcatttctcctcacaacatcgtgtgctcaatagctatttattgaataaaggacagaatgagtgaatggttctgcctttgctttgaaaagttgttcatccttttagaagaataattccatctttagtgactgcattgtgtaaaagaggactaacagggcctgcccatagacttccaagggattttctaacaatatcaatactttcatccctagacccactcaaattctggaagggactgaacttgcatgacatgtggggaagaaagcagatccagacagagaggagacctgaggtcctcctcacctcttcccactgtaaatttctaagactgggcttaaaataaactttaaaggcataggagtttggcgttctaatgctactctgaactggactgagttgcaaggctagatggctgggtggactatctgggacctacccaagatatcacccaaagggtgggggaaaacaaagccccagagaggatttggaagagtagtgggagaaaaattaaggtctggtttgttctataaaattcaacatagcgtaatgggcaaaaatcagtcatgtgatgaagatgtgcctcagaagcacttacttctggaacagaaggacctgtagatgtggagtatcttgaaagatgtgtgtggcgacagaagcaagtgctggggagtcctgacagtccagctgctgcaggttgggggtcatcttgaaaatgtccccctccagggtcgtcagccgaggcatcttcctcaggtagagggatgtgagcttcggcaggtctctgatccaccctgactcaactgaaacacagaagggaaactgccaactactccagaacgcacaaacccaggaggccagcacggcatgaaggaagaacgagagtggcaaggtgaatggtgaaggtcatcgctgagcacgggcacagttagcagctctgggaatctcagaattgtggtcatttcagctggaagggtgctcagggacaagcagtccttcctttcttccaatctgagtcggccaaggccagagaggggattgattggcccaaggctacatagctggaaagcggcagagacaaggcttgaacccaggacactgtctccaagtctgttgctgctccaccttctcattaaagtccacacagaaaataaccagactttgctctgatgtctgtcaagtgtggggaacttctgcggaacgtaattaaggaggcgaggggcccccagaaacctcattttgtggctctcctaatacatggagaacgtgccccttcccctcggtattccccattctagctgttttttctctttgtctttgatgaaacaggtggttgtagacacgtgaagtgttttttaaaaaatagtaaaaccgaccttgtgaatcaaagaacaccaagaacaggagaccggttatcctcaccactctcctgtggcttgagtgattaaacattcacagaaactattttgcccaaccaggtagaaaaatcagtgaattcatcctggaagcctcagtcacttcagctaactgcatgtttgcggctcagtttttccattcatcagccccaaagcatgcactcacttccccattccacaagcacttatccagccatgctgggaagcagaacagagtggttaaagttttgggctctggacccagaatgcctgggttcagatttgcttaatgtgtgaccaagtttcgcctttctgtgccagggttccctcatatgtaaaaaggagatggtaacagttcctatctcttaggattcaagaaagtgactcctgtgtggcgcttcaaactgggcccgcttgctcgaaaaatgtagctggtgtctttttgaaccctcctacgagctgggcacccgggtcacccctcgaggaagaacgcagccctgccccccggagcgcacgcgcagcctggctctgcgctcaggccggctgaaaacgcggggcgcccggactcaccccgttcaaggaacgtgccgctgagatccaggacttcgagcgtgaccaggggcgcgccatcctctccagcgaacgccgcctcggcgatgcccccctgggctccgcgacccagcgcggtgcaggagaggttgaggagctgcagcgcggggaagcaggcgaaggcccggggctgcagcgcccgcagcggattcccggcgagcgccagggcgcggaggctgctcagcgcgggcccggtgcacggcggcagagcggccagctggttgtagctgaggtccagggtgtgcagccccgccggcccacccgggccccagcgcagcgcggcgatgcggttgtggcgcagggtcagcacctgcagctgctccaggtggccgagctcggaagtgctcagggcgcgcagcaggttgtggctggcgtcgaggctgcgcagtgtgcgcggtaggcagccgggcaggcgctccaggttgcggttcgccagggtcaaggccgtcgcatccgcggcgggcagcccctcgcagggcgagtcggtggcgttgctgccactgctcccccaggggccctgctgagtgacccggaagagcgggaccttctcctggggagggtctgcccagctggggcgcagcaccgtcagcagcagcagcggtagggtttgccgcatggcgtctggggagagaacagcaggacgcccatcaaatccacaggaacccccgcacaaagagtcagatgcgcgtcccaaccctacctccagggctctgaggaggagcacaggcgctggatgttccctgcagggcggggagacgttcccagagtcgcctagtgtgcagtgacctctcccctgtctgcttttgccctgtcgtctcccctaggagcacggtgataccccctgctcttcctcccctcaaggatgccttttcctcttctcgtgagagggaggccttcttcatctgtccaatctgggcctgaatctctcaataactccctccgtttatgtacccccatcctgtgagcttctacaggaaagggatgtcccctttattgctgcaaactctccccaggtaaacagtcactgctccataaacgtgaatgccctcaggaggctagaaacatgaggaagattttgtccgttcagcaactctcagttaccccgcttttccccattagaactgcccagccgcaggggaatcctagtttgcctaaaataagtcttggagtcagtttcttggcagcatgctcagggttgccttcagcagaagaacaaagccctgtgaaccctggagtcaaacatttgctggtcccatgtgggttccaacaaaagccagagcccccagtattagccctgcccaggagggatggctgagagctgctagttgtggaatttctggactacctagggttgcacaggtcagctaggagatcaagcagaggaagatccggcagccatgggctagcttgggagtggcaaagataccgttaaccatgccctggccatgaggtcactgctccatatccctcatcactgcagatgtgtattcctgccccagctctctgtgctgaccagtagatctccgagtcaccacccaggctccaggggaagggtctccctattactagctggggatgaaggcagtgagaaagatcctggaacctgaagccaggagcgtgtgcacccagcagtgtgtcatgcttacctggaagtggtccttttggagtgtggcttctctggatgcacctctgaagttctcagctttgttttatagattctagggaccactgatttggacagcaactcagctatgaactccagagggaggcctgtctcccagctgcctctctcccacaacccccatccactgagagggactgagatactccagtctttcccattgctcctcctttcccatcaagacgctgttgtctttagccaacaccctcattgctcagctccctcctctcccgctagggcctgcccctggccctttccaggcctggcacctcctcctagccctccccatctttacctctcggaacactacctttcccaggctggagaaatgaaaggagtagcggtgagggctagtggagtgcagtgaggcagagcagcgctgtcacctcttaggaatttgatccttcctgccaggtggctcccattttctgggatggctggaagccaattctcccaaaggagggaaggcatccgagtctagaggaagcttgcagggatttccaggaaaaagtggcaggagagaggatcctcagaagggtctggggcagagcaggctcaaaccagacccaagaggccccgaggacagtttgtttggtggctctgggcccccgctcagtgacagtgtggacgtttgtctctcgtaaggagtgagaataaacagaggacagaaatgcagaaagaacattcccgctgcatgcctgggaggatgggtcctgactaccagccccaggtctcccgaagatgtgatgcttgagtgagctttgtttagagaccttttttttttttttttttagtttttaaataaaaatattcatttttatcttacacctattgatatggtttggctgtgtctccgccaaaatctcaacttgaattgtatctcccagaattcctgtgtgttgtgggagggacccagaggaaggcaattgaatcatgggggccagtctttcccatgctgttctcctgatagtgaataagtctcacaagatctgatgagtttatcaggggtttccgcttttgcttcttcctcattgtctttcgctgccaccatgtaagaagagtcttttgcctcccgtcatgattctgagggctccccaactacatagaactgtaagtccaattaaacctctttttcttcccagtttcttcccagtttctttcccagtttcagcatgaaaagagactaacacacctatatataataaatgttcacttattatactctatgttgtagtcataatgaaaggaaatactaaataacaaaatgtttagaagtgattatctctagatggtgggatgacgggatttaggtggctttattttctttttctttttttttttttgtttagagcagacagcacctctctctcccagagtcccaaggcagagctcggtcatttcctctgagggcctttgatctgcatcctcccccaatcccgcctagccccatctgagagttcatcagggttaatgagccacagctttgcgtgacagacactgagaccagaactttcctcctgtcagtccttatctggacagccctgaggaactccaggatacctcagaaactggcctattagggttgattggttaattggaaattcccgaggatctccattgaggccttctccacccacagcctgaagatctttccagtctcagtgccagctaggaccctgctgctcacaagcgttgctcctctgcccgagcggggcagggagaggccgctctgtgctccccagcctggggctcatgcagtcacctcccagggagcctgggcccaggccccagaggtataaacacatgccatggagacataggaggccaggtgggaagaagtcagagagaggtgggttcagcttagaggtggggtcagcacgcagaccagtgggcagcctgcttcctctttgcctttgcacggacagctccacgcccaataattaaaacattaagccaggcatggtggcttatgcctgtaatcccagcatgttgggaggctgaggcaggaaggcaggagttcaagacaggcctgggcgacatagcaagacctcgtctctatcaaacaaacaaacaaaaagaattagaacatcatgtttccctcagagttaaaccagccaggtccacccatgtaaggcgactgaccatgctgaggccagcaggggtttggggagtccaggcagggctttcccagatgagagggagccaaatccatggaaacacgcctggactgaacagagaccctgagggggaaggaagctggttcactgcggaggcctataaaacaggaccttggggagccatgtcggggtgctactcctctgtgcaccagtaggcgagggttctggagtggccctggctgaggaattcccctggaggcatcatcctgtggttgcctgaagccccaggccctctgagccaacttcttgccactgctgcttgctggccagtttgccagtggtggcaagggcctggcctggccaggctgacctgaggttggccctctggactgtcctgtttccctggtcatacccagccctagcacacacatccttggcaggctgccccgtgcggcttctgagctggggaggctgatggcagaccgtacatggcagggtttgcttatcggtctttctggggcagtcagttggccttgccccagtgggtagtccactctgcttagcttcatcatctcctttttaaaaactgagcagttactatagtcagagcctaatgccatatgcatagtctcgtctaatcctccccaggtacttactattatattacagacgaagaaactgaggctcgcaaaggtttttgtgctctagattctggagcacatatggagtgagctatgtgatttaaccacgtcttttttttttttttttcgagacacagtctccctctgttacccaggctggagtgcagtggtgcagctgtggctcactgcaacctccacctcccaggttcaagcgattctcatgcctcagcctcccaagtagctgggattacaggcatgcgccatcacgcctggctaatttttaggggctatttttactagagacggggttttgccatgtcgaccaggctgatcttgaactcctggcctcaagtgatccacccgccttggcctcccaaagtgctgggattacaggcatgagccactgcgcctggccaaaccactgtcttacattgccttccatagacctcagcatctgatactataatatgcccttaagcacaagagaatcttctccaaatacttagacccaaattgtgtgagaagccaagacactgggaaatttcctgccatagttgagcagctcattctcaaaatacacagggctgacttcttgggtcactgtgggcccaagactgaagaggatgactgggtagggcctaccaggcacctctcagggaggctcagccctcttttccagccttttctcctcttctagcacttcttggaggtcaggacaagaggactaaagtgtttgtcctctccagagaagaatgctaaggtcttgcaacacaatcctggaaccaacaaatatgcgtccttcaaatgccacgccaagtgctgtgccatgcttgccctccatggttttactgtagctgttcctctgcctggatgccccccattttattgccttagtctctatttcagctaattttttttataactagcgtgggccctcttgaaaggagaccctgaaatatacacctgggtgccatacccataatttatttgggaggcgatctcaaggagtgcggagatggaataaggaagtgagacagggaaggaaaggcactgatgatgtgttgatgagcagagactgccatggacaactggggctccatcttgctgggggcctcatcttgctgggggcctctgtaagactgtgtagagcatacctcaggattgttccattaagtggcaaggaagaggggatatctatccaccagcttctgctttttgttggtttgagggttcttctgtggctttaacttcctggcacatagatcaagcaactccatggagggctaaggggatagggtaggcactgacagcacctgctatagcatccttcaagatttcacccaagcggatgcccccaggcgaattaagtgccttccttggtattctttcctaggtaacattggctacctttcatcaagcagattgatgtggctcattctgtagtttaggactaaacttcctgataacagagccgcatggtttatttcctagccctagtgcctggggtggtgtctggcacacaggagaaatgttctgacaaatgaatgggaaaaggtatgacagtgtacatggaggatcatggtgttcttcacaattcccaggagtggatggggcaggactcaaaacagtaaaaatcaaattcaagttcctgaaattcacagctcaagtcctccagcatcccagcattgagaagggctaagatgagagttgagacggaggagtgagcaaaagtggaggtagaaaattgagtcccagaaaaccttccaattcagattccccacattcttaggatctttgagagaaaaaatctgttggaagattacaaggttagacagtaaaactatagcagcagggggaaaaaagagccagtaattatatacttggccacacttttatggatttagataaaaatcagagtcatggatctttggccttagaaagaactttagaagttgtctggtcccatccctccttgtcgattttaggagaaaactgagccccagagagagaaattggcttgtctgaggtcacacagtgttgagttcctaattacccagtgaaaagcaaaggcgatctaattctcactgtttcactctggctctgggtttatttgcacagctaaccaggtctcacctgccctgatattagcaatgtgagtctttccctgaaggtatggctaagtaaacacacctggcaagcatcaagccacagagcggtttcaggggctctgactccagctgttcccatttacccccagaactccaggaataattactcccaatacagactgccccagagacccagaattggtatcttctaagtgagtcctgtccagctctctttacaactcttgcagcctgcaatggggtgatgagggctggcccaggtgacaggtgactgcttggccagctgcccctgccctgctctccagatgccagtcagctacgctgaggggtcttccccaaaacatgggagtcagaatgtacacgcctaaagattacattcttctctgacaccagagataagccagaagaatgggagggtgattgtgggaggagacggtaccaggttgtcaagtctccgggaagagccagctctctcccaaaatggaatgtagaaaagaggcttccaagtggtagaaaccaagatatctgagtgggttcactgacgtggctgccctgcctgtgaggaaatgatctggaggaaataaagtagtaatgggttgagacgcatgtttattttctttttgaagtgtcactcaccaagtcatatttcagcatgaggattgatagaatgcttagaattttagaagataccatttgagatccttttaaaatccatagtggaaaagattcaaacagaaatgtgagttcagactctaacctgccactttattttgcatgtgactttaggaagtgggatgggacagtggataggaaaatttacaaattatattctggaatttaccacagccagaggcagcatactaggggaaaaggaccttaactgggacacaagacgctggattctcattccgacaccgctaccatctttctgggtacagtgtctgtgttcttaagcttctgtctatttcttatttttcatctgtaaagtaaatgaattggcttagcagttcagcacatgtatcttgagaccatgctagtgtacgacccaggtgctcaggagataacacgggggctcagagatgaacaaggcttggacccttccctcaagcagttcccagcctagaagggatggaagacagaaaaaaatcatgcacagtgtgagcacacagcacatcacaaaaagttgaactgtgagctctgttcatccagaaattatgtctaacttgttcactgctgcatctgagtatctggcagcaactgcacaccatagatgcttaagagagatttactgggctgggcgcggtggctcacacctgtaatcctagcactttgggaggccgaggcgggtagatcacctgaggtcaggagttggagacgagcctggccagcatggtgaaacctcatctctactaaaatacaaaaaattgactgggtgtggtggcactcacctgtaatcccatctactcaggaggctgaggcaggagaatcgcttgaacccaggaggtggaggttgcagtgagctgagattgcaccgttgcactccagctggataacaagagcaaaactctgtctcacaaaaaaaaaaaaaaagagagagagagagacagatttactgaatgaatgagtgtgactgtgccctctccttctcctgtttctgatcagttacatttccttatttggaattttcttcagaagagcagtcggggtttgtctgtgcatttatttagatttctaatatgttaacgaaaattctttcaaaaatagaagtgcttgacaaacaaagcaatgatttggaatcttgtggagctcgagtgttatttattccccattgctatagaaacgtgcagatgcattgtggatgttcaggaacattttgttgaatgaaaaaatgcatgctgttcaataagtataggagcatatgctcaacatcattatttaccactgaaatgcaaatttaagccataatgagatactatagtacacccaccagaatggccaaaattcaaaagattgacaatatcaaatgttgccaaggttgtggagcaaatgtaactttttttgaggtgggggtctcactatgttgtccaggctaatctcaaactcctgggcttaaatggtgcctggctagaactcatatgctgctggtgggaatgtcaaatggtatagctactttggaaaacttcttggcagtctctatgaatgctaggcatatgtctaccctattactcagaaattacactcctgggtttatactcaagagaaatgagtgtgtatagccaccaaaagaatgtttatagcaactttataaatgctccaaaatggaaacaacccaaaaggctatcaatagaaaaactgatatgtaaatcatggtatagtcatacaacgggttactatacagccacaaaaaagaatgaactatgccatgcttaacaacacagatgaatctcttagccaaacacaaaagagtacatactatatgggtttatttttatgaaattcaagaacaggcaaaactaatcaatggtcagaataatggttacctcttaacagcatcccaggcagagggaattcccgttctaaatcagtggtcagaatagtggttatcttttaagagcatcccaggcagagggcccagtatgtgaaagaaatggaggcttgacaaggcgtggtgtgttgagcaaacaggtagttcagtatggtggggggggggggtgggaggatgtgggggccatggaggaggagtgtagggaggagagattggaaaggttatttggggtcattctgtgaaaggctctgtggtagtcatcagggctattggccatatacttcaggttttgcctcttttggctactggtaggattgtactgcctggccctttgtgggtgggtggggccatgtttccacgttttgttctggccaatgatttgcaacaggaagtgatgtgtgtcacttccagacaatgccatccaattgttagtatgaggccctccagagctctgtcttcctcactggcatgccagttgccactatttgatggtggttgctccatcagcctggatccctaggaagacccgagctcccccagggctgatcacattgcatagatagtatgagagataaaactttgtggtttttgggtgcttgttaccacagcataacctgtttatttggactgacacaggccttgattacagtgtcacgttcataggttcatttattcattcactcatcacgttgaatgctgctctgtgctagatactgttctaaatgccagagcaggcatagtccctcctctcaaggagctctcattctgttggggaacacagacaatatgcaaataaatgaacacggtcattatggatttttaaatttttatttatttaaaattttttaatttctgtgggtgcatagtaggtaattatagattgcaattagagttataaaggaaataaacagggtgatgtgacataaaggaattggaaaggagagtggagatggtcatcaagaagggtgactttatttgaactgagacctgaggatgagagggagctgtcatgcacggggccatgggaattatgttccaggcaatagcaagaaagagcctgctatgtttgagatgcccttgttgctgtgtggattgcaggcaaaagcaaagctggagagttacattaggaagctgttgaaaatgcccatggggggaggtggtgatgttgccctgagagtaatgacagtaaaggcgaagacaagtacacggatttgaaatatgttttgaaagtagaatcaacaggatctgttggtggattggaagtgaggtgtgttaggctgaataatagtccccaaagacatccatgtgttagtccctggaacatgtaaatgttatcttatatagtaaaaggaattttgtgtgtatgattaaagtaaagaccttgagataaggtgattatccctgtgggccctgaatgtaatcactactgttcttttttttttttttttttttttttttttttttgagacagagttttgctcttgttgcccaggctggagtgcaatggcgcaatctcagctcaccacaacctccaccttccaggctcaagcgattcttctgccgcagcctcccgagtagctgggattacaggcatgcgccgccaccacgcccagctaattttgtatttttaatagagacagggcttctccatgttggtcaggctggtcttgaactcctgacctcaggtgatccgcccacatcagcctcccaaagtgctgggattacaggtgtcagccaccccgcctgtcctataatcactactattcttataagagggaggaagagggagaacttactacagagaaggcaatgtgaagacagaaggaaggccgggcatggtagctcatgcctgtaatcccaatactttgggaggccaaggtgggaagatcacttgagcccaggagtttaagaccagcctgggtaagatagagagaccctgtctgtacaaaaagtttaaaaattagccaggcatggtggtacatgcctgtggttccagctacttgagaggctgaggtgggaggttgaggctgcagtgagctgtgattgcactgcactcacagtgcactcaaagtgttgaggagacaattggccatccagctctggaattcaggggagagctggggctacatttgggaggcatcagagtgagatggtgcttaaagccaatagacgggttgaggtcacctagggaaggtgagtagagacggaagagaaggggattaagctatcattctatcctttgaaggtgggcagaggaggaggaatgagctgaggtggatgagaaggagcagtcagggagatagaagaaaactcacgaaagtttgataccatgaaaggggagaggcctgtttcattgaggaaagcatggctgatcaggtttttagagactaaataagaggagacatttatgacctggacaagagcagggtctactgaggggttgagactgaagcaggagaggagtgagttaggacacgggaaagtgtgtgttagccttcttaactctctggagaagctttagggtgagatggagcagaagaatagggcgaggtagagtttaaaaactatttaaggtgggggacgttgttgtgattatttcttgctgacaagtatcccaaaacttagtggcttaaaacaagtcattattcagtacatcgtcacttaacgttgttgataggttcttggaaactgtgactttgaatgaagccatgtatcatgaaaccaattttactataggtgaattgatataaacaagagttaggctcctgtggcatatttatggtcacgaaaacatcaccaaaccttataaataaagaccaaaacacttctaatgttaaatattaaaataaacggcctggtgcggtggttcatgcctgtaatcccagcactttgggaggccgaggtgggcagatcatgaggtcaggagtttgagaccagcccggtcaacatagtgaaaccccgtccctactaaaaatacaagaaattacccgggcgtggtggcgggtgcctgtaatcctggctacttgggaggctgaggcaggagaatcacttgaacctgggaggcagaggttgcagtgagccaagatcgtgccacggcactccagcccaggtgacagggcaagactccgtctcaaaataaataaataaaataaatgtgagctatacatatattttatatttaagaaagattaataaaaacaagatcattatttacctgcttattccagttcagggtagcaggtggtcagagcctatcctagcagctcagggtgcaaggctggaaccagccctgggcaggatgccatcccattgcagggtgcgttcagacacgcatacacactcactcagacttgaaccatgtagacacgccaatgaacttgatatacacagctttgagacgtgaaaggaaaccagaatgcctggagaaaacccacgtagacatggggagaacctgcaaacttcacagagacagtagaccaatttttttttctcatccacattataagaaaatgatattgaataaaacaatatgatttgaggacctgctgtatttgattccgttattttgtgggttaggaatttggttagcgcccccctagatgattgttttgcttcttgcagcattgactggggtcattgctggtagtcagctgttgaaagggctggtttgagggtttaaggtggcttcactcacatgcctggcaccttgatggggatgactagaaggctaggctccaccaggactatcgactggagtgcagacatgtgacttctctagcatggcggcctcagggtaattgaagttcttgcaaagtggtctcagggctctgtgagggagtgctccagcacaggacagatgctgcttggcctttcatgacctatgcatggaggtcacatagtatcccttttgctgtactctattggtcaatctagccacaacccctccaccccccggatttaattagtggggacgtagatacctcctttttttttcttttttttttgacagagtcttgctctgtcacccagtctggagtgcagtggtgcaatctcggctcactgcaacctcagcctcccgggttcaaacgattctcccacctaagcctccctcatagctgggattacaggtgcacgccaccatgcccagctaattttttgtatttctagtagagacggggttttgccatgttggccaggctgggctcgaactcctgacctcaagtgatcctcccgcctcggcctcccaaagtgctggctttacaggcatgagccaccgtgccctgccagatcctccctcttgatgggaagactgtcaaggaatttgcagccatgtttaaacccccacagatacagaatatgtttacagattagatgagaaggcactggggagtggggggaggtgaatgatgcagaagagagaagaggaaactgcaggaataaagtccttcagaggccacaaggggataatactctgaaggcactcctcactgaaacagaagaaaataagatatggcgaggacaggtgcacagtgaaaagatgaggctgttcccatatgataacttcatgctgctcgataatgtgcaggtgagctcaacagctgaggggcggatgtggagggttgagaagaaaagagggtaggacagtaatctcagagaattggaacattaggtatttttttgaagaagattttaatagtgatgacattttgtcatttctggaaagattataatacatgattattaatcctcagtaatatattaataacacaatctctttactagcaattattaattatgccaactatttatggaacccatgagagatactccagattctaggtgttgctgaccaactcttgttcaccacatttctttaggagggaggcaaatgctattatttccattttattgctgcagaaattatattcaatttcataaagtaaatctgataaaggacccaagatgagaactctgagaccatttctgagggaggagtattgagaacatggagaatacttgcttgttttacttgagagaatgtttggattgccaacttttaagagagataaaaaagattatttggcaaaagtcagtcttcagcaaaattacttagttaagtgaaatatttttgcaaatgatgcttccagtgttaaaaacatgtttgtaattcatgttctggaattgctttcaggaggagtttctgatacacgcgtgcgcacacacacacacacacacacacactctacaattatcaggattatgtttatttattaaatcactcacccaaatattttatttatcctaatctcataatgcaccttacttagtctcagatatttccaaaaatcaaccccccatgaaagtactgaaaaatcatcgacagtgaggaaattacagagaaggtgaatcaggctttgctgagaatttccaaaggggggttccaacgatgttctgagcagctccattgcaaaggtccacacacatgcgtcacagaatcccattatgtcaggcatgactgaggtcttagagtcacccaaataaaacttatctatgtgctctgacctctcctccttctgacactctttatatttatctaccaattgggcttccagtcattcaattagtcaagctaaagattgtagggtcaacttgaccctctgctccattactgtaaaattcacttgttcattgctcaccactatcagttagaaatgcgttcagctatgaggtacagaaaccctacctaacaatggcttaaatacattcatttatttttcttacataacaaaaagtcacatccacattcaaggcaggaagaataggaaggtgaagggtgacgtcagctgactttcccttttgttaggatagaaaaatctttcccagaaatctccaaagcatacttccccttaggcctcattggtcagaattggatcccatggcccctccccggccccgccaacctacaaaggaagctgatcagttagggaataagattgtcataattggcatagaccagtgtagatctatcactgatctggacacattgattcagcccaaatcaagttctgttagcaaggaagatgggaaaatggttttgggtaaaaaatggtgttggccacaattgcaatctgctcattttagttctgcagcagctgattttaggtatggcacagtggctcatgccatatataaatggccgggtgcggtggctcatgcctataaccctagcaccttgggaggctgaggccagtggatctcctgagctcaggagttcaagaccagtctgggcaacatggcgaaaccctgtctctaccaaaatcacaaaaaattagccaggtgtggtggtgcgtgcctgtggtctcagctacttgggaggctgaggtgggaggattgcttgagcgtagaggtggaggttgcagtgagctgagatggcactgctgcactccagcctgggtgacagaatgagaccccatctcaaacaaaacaaagcaaaaaccataatcatgaatactaagggcatgcctcacaaatccctgtggtctcatatctgaccaactgtgcccatgtatgtttcttaccccaacacacagtaacatgtgcagccccttatcttaaaagggtgaactttgcttgagttacatgcaatggattcagcaggttcttgccaagtgttggctgcctgtttgctctcctgatgtctacctgattaaaagaaccttataaaaggaggaaaaggtcagggtaaaaacatttcatgcagcctctagaaacagaactcagtcccttaggaaaagtcacctctctctggtaggacttggcaccaacgattgccacacactagtgagagttgggccaaccagttgtaggggtggaaagtcctctggtttggtgtcgtctttgtcgggaaaaaaggcagaaccctttcctccccttcttaactccacctctcacccagatttgcaagcaaacgttacattggaccaacagtgggaatctgagaactttttagcagaaattttcactattttggcatttgaaacctagtgtaaagtaattggaagaaaaaagtgtctatggagttctgtaggtcttactcaaacatgttctgagaaaaatcaactcaaggacattgtcacgagtaaagactatctagggtccttggctccggaggccttgccttctcatgggaaatcaagagtagtgttgaggagcaagctcaagtcagaagattttcatacaaatccttgcttcccacatactagctgagtgactttgacaagttgcttgacctctctgtgcacagttccgatgtgtgctggagctggtttatccccactggaaagacggatgtttgcatttcttcccaactctgtgttcactgacatcatgttggctgtggtgggaatctttataccatgggaattggcaaatcagtgtttccccagtccacagagttgtaaacatttaccagtgcaccactgcatgttttctactttgtacaatgggctgataataccttcctcacctaggggatgaattgagagaactcataggagacaaaagtgatagcccttaatacacacgagttttctaattcttttagccatgtaaatgtttgctatattattgttgagactgctttttggagaggtgggagctgatttcacttgctctatcattggtttgcaaagccacttaccattttggtatccctgttgctcctggggcctatttgactgctatggcaacctgtcaacctaccctgaaattcagcaaattatttaacctgatggcatggccggaataatggggttgtgttggcagagagacaccggagtctctgaagaaaacacatgcatgatacaaaggtcccagattattacacctgagtcggggatatatcttgacctgattgtggtggagatggactgtaatcaatggaggactacaatggcatggtctcagctcactgcaacctccacctcccaggttcaagtgattctcctgtctcagcctcccaagtagctgggattacaggtgcgctccacttcgcctggctaatttttgtatttttagtagagatggggtttctccatgttggtcaggctgatcttgaactcctgacctcaggtgatccacctgccttggcctcccaaagtgctgggattacaggcgtgagccactgtgcctggccaatttccatgaatttcaaatggcttaatagatagcttattaaaatacaaaaacaaaaaccaggagacaggatggtataaagatgagaaagacacactctgaaatgccatcagctgtgtcttaggataccgctagaatgggatagatttcttattctcctttttggggatatctcatcctgcattagtcagctattccacaatgatgctgcttaacacactgctccagaactcagtggcttacaataacaagaatttgttcccacacaaattgtctgtgggtcagctgatctagctcggcttggctccaggctgtggactccatttagatctgctacatggattccattcagtggctcaggtgatgacctggggaatcctgttctcacagtggaggcaggagtgcaaaaggattgcaaaagcacagtggcagcctctgggccaaaggaagtcaaacggccaagtccaacagtaagtgggcaggtagtatgtgccacccatggtaggagaggagaggggagaaaatatttgctgaacaatgatccaaactgtcacacaaaccatcacacttatttgaaaataagctgataaactatttttctaattaaaaatatgttcttgttaaaaataatactttacatttgtattgcatattatggttttaaaagcatttttgcaccattctctcatacgtttcttccagtgatagagtggaaaggtagcatccccatttttaaagatgtgaagattctggctgcattattttcctagaactggtgtaacaaaattaccataagccttgtggcttgaaacagaaatttattctcccacagttctggagcctagaagtccaaaatcaagatggcggcagggccatgctgtctctgaagggcgcagggatggatccgtccttgcctcttcctggcttctggtgtttgctggccgtctttgggactccttggcctgcacctgcatcacccctgtctctgtctccatcatcacatggcctttcctgctcttttcctttgttagttagtttgtttgtttaagacagagttctgttcttgttgcccagctggagtgcaatggcacggtcttggctcactgcaacctctgcctcccaggttcaagcgattcccctgcctcaagcgattcccagtagctgggattacaggcgcccatcaccttgcctggctaagttttgtacttttagtagagatggggtttcaccatgttggtcaggctggcctcgaactcctgatctcaggtgctctgcctgcctcagcctcccaaagtgctgggattacaggcatgagccactgcccccagcctaccttttcctttttttaaggacaccagtcatattgaatttaggactcaccttaatccagtatgacctcatctttacttgattacatctgcaaagaccctattttcacataaggtcacattcacaggttctgtgcagatgtgaatgtggggggacaccattaactcagtacactggctggcagaatttatggcatctacactctttcttgacaattcctctggtgtctggtatcctccctgccaaatccatgccacatctctaaggccagatcttcttacactcctctgggcatacatatcgctgagagtcttgttaaaaggcagactctgactcagaaaggtctgggtggacctcagagctgggattagggtgagccgaggaggtgccctgtacgaccctgacagtgagggcctccttaaatgctgtgcccgggatgcctcacctgtgccaccctagtcctggccctgtgagattctgcctttctgacaaatgctgctgggccaaggaccacactttgagttgcagtccacgtgggtttcatgcgtggtatctcaccctcaatagcaatgagggtgtttctattttgaagttggatgtctgtaactcctagaaaggtaacagtggttctgctacatttttctttttctttttaaataacattgggtcacatgggctgggctggctgccaataatgttggttctttagtgacatttcaggaaattaagctggtagcacagagattcagggcccctttgtaagcacctggtcagaccttcatccccagccctcctggcttcccagaatatcccaccattagttctgcctcctgacctctgtagcactgcctggaagaggtctttgctctcttccaatagcctcccctaccagccaggggctgggcccaaaccagctaccccatcaccagcaatagagcctatgcactgagccctgaccccaggccttgctgcaagccctactctttccttacagttttatatatatatttatttatttatattatatatatatttatatatttattttaaaattttatttttagagaataaaattttctcagggtcgtgctttgtcgcccgggctggagtgcagtggtgcagtcatagctgtctatatttttgaacttaatttgccttccctgttaccggccccatttatgtccatcaacacatctcttgagtcagagggcacaggcttggggtgttgggcccttccctcccccagatcctctgctcctctcacacagggctctgccttctctccacgctccacttttgcaactgagggatgtcagagggcagccagaggcctccccgcccaacttccaggggtgaagaagagagacactatcctgttaagtccccatgcagcttttgtcatttgcagtggctagggagaagcggctataggacttttcctctgtgatgactgaagacactgcagcacatggggaattatgggtgtttttggagctcacagagtaagttggagaaaagaggtaaatccttttagtggaaagaatcttccccacaggtgttagtcaggagcattctcattcaggttttttaaaaattgggactcctctgagataactgagcctttacaaaaattattatgattattttaaatagagacagggtcttgctgttgcccaggctggtcttgaactcctaggctcaagcaatccttccgccttggcttcccaaaatgctgggattacagatgtgagccaccacacccggccaatcactgagtcttgatgcaacatgagatgtgtgtgcaaatgtcaggatagctttttcttttcggtttttgtttgtttgtttgttttgtttgttttgtttttgtttttttgagatggaggagtctcgctctttcacccaagctggagtgcaatggtgtgatctcggctcatcgcaatctctgcctcccaggttcaagtgattctcctgcctcagcctcccgagtagctgggattacaggcaggtgccaccacacctggctaattttgtatttttagtagagacggggtttctccattttggttaggctggtctcgaactcccgacctcaggtgatcctcctgcctcggcctcccaaaatgctgggattacaggcgtgagccaccgtgcccggcctcccctctttctgatagcactcaatatttccacacaactccagtgaggttcaaggaattggaaaaactttgaagcaagtgagggccaagggcttcactttttcagtttttcagattttccagctatgatttcctggactcaagagtccttggctgtagggtgcatgagaaggaaagatgggtgaaataacaaagaggaatgttccctttctgtctcctaccactgagagattctggggtgacaggagtggaagggggagaggcaggaaagtcacgctatgtgagaaaataattaaaatgaatatagagatactaaatgtagaagccaatttttttttttttttttgagacagggtcactgaggctggagtgtgatggcatgatcatagctcactgccaccttgaactcctggagctcaagggatcctctcatctcagcctcccaagtagctaggactacaggcatgtgccaccatgcccagctaattttttaaaatctttgtagagatggggtcttgctgtgttgcccaagctggtcttgaactcctgggctcgggtaagcctcctgccttggcctcccaaagtgctgggattacaaggtgagccactatgcccagcccccaaaaataaatcttgtgagttaaaaataaaattttaaagtgattttagaagacagatattataaaatatcttgacttcttgtattaaatgagttttcaaattaaagcttcctcatttccttacttttctgaccgtgggactaaaaatgaaactttcccaaaattaagcacggtggctcacgcctgtaatcccagcactttgggaggccgaggcaggcggatcacctgaggtcaggagttcaagactagcctgactaacatgcagaaaccccgtctctactaaaaaaaatacaaaattagccaggcgtggtggtgcatgcctgtagtcccagctactcgggaggctgaggcaggagaatcgcttgaacctgggaggcggaggttgtggttagctgagatcacgccattgctctccagcctgggcaacaagagtgaaactccatctcaaaaaacaaaaacaaaaattaaaacaaagaaaaaaacaacaacactctaagcacctcatttctctggctcccagacctttttggtccagcctctcctcccacagctaactgctcttaatgcccctggttctctcttactggtatgagcctgagctcaggaacgcctgctctggagctagggtaaggggcatttcaaggctgggcaaggctgggaaggaagggtggggtttgctgggttaagcttagtggcttctggagtcaagacaaacactgctcattggcagtgtgaccctgggcaagttcaccttctgaacctttctcctttgtagaggaagccatttctaccctctgtgggctgacaggagaattgcacaaagggatatctataaactgcatgtcactaaagcaaagtgccctcaacactcagccatcagaatcagaggcttctgctgttctattgccgctggggatctttgcttgctggtgtgtgtgtgtgtgtgtgtgttttaatatagaactggaaagagacaaaagagctcatgataaggcaggatatgccaggaaatctgtgaccaagtcagtgagaaaggagttgaaaccagcgggtaagtgaggtttctaaggggctctctgaggacccctggaatctgccactccccacaccacgggagggaacgacccggaatcttggcgctgtgaggagagacacatgttagacctcagagttgcagtcccttttcataagagaggaaaaagtcacctttttggagacagtaggttggagaggacacaacaggaccgtactcaaatccatataaatcttttacttaaaagtcatataaaagaataaaaaatgcagatttctgaatcaactgtagataaggaagcaaatgatgttgaaaggtgcccattaatttaaaatttcatcataggaatttgggtgaccttttgcactcagtattaaaaaaaaccatcaagttgctctttggaacagtagcatttaggtttgtttttttttttttttgtcacacttgtttatttctttgggatgttgctgtgtgtcatggaagaaacgctcccctgaaaactgtaaccaaacaaagtttggttaaaacaaagttggttcctttgttttcatggaaatgtcagacaactatgaaaagctaaggaagcatgttgaactgaaggtctggctttggtaaattaggcagagatgttctcagcagcaaacaggtaaaatctgacatcgagaagcattattttaatgtaggaccagttataatcttaaagaactgactaggttctaaaataatagaactgagaaataggactgagaaatgaccaacatcaagtatatacggtacacttagcacttgtttctatagaaaacatttcaaatcaagttctttatgatgtgaaccagattttccaaatgcctaaaccacttctgagctttaagcaaggcctcagaaattcagcgggtgcctgggaggcttcattcacattcacctctaaggagaggctaaaagaggaatttccagatggcagctactggctcagaaccagggggtcccttgccaagtctgtctctatgtggctcccggaattgctgaggtctcacttctcagagggctttgatggaaaataaagcaacagctgacgctcacgggcctcggaactctggccaggctccctgaggggtgcatcctaggagaactgaaaaatgggattggagcttttgccttatccttacaccccaagttctttgtgtggcagaacatctatgaaaaaataataaaatattgtctgatatttccctttacttctggtattgcttttgaccttctcaaaacccacccctcccacctctaacaaaccaaaatggaaaatgacaattcaggcagctgttaattggctcactctctcaaggcaagcactgtctcaaggcagtctcaaggcagagatgacacagcaaaaaacagagggggagaaaaaagtctattattggcttgtgatttacaaaagccaaagtcctttagataaaaggccaggagtcgtaccaacatagataccaaatccaggagaacacagaccagcgataagagggacgcttccccatgacccagaccagcctaaagcccctgtgggggcagccagtggggagctgtcagaccttggacatggtggtctttgagaatgggtctgcccttctctccctgaccagttgggatagacacctgactggaatccttgacactggcaggtgtttctatgaacagagaggactgtgcctgtcttcctgaatcccaacccagagtagaagcagtggagacatggatctgggttgagaaatgggttttcctgtccccctgtgtcacccacatcttcacaaaggacttacaggtggctgagagatctgtaggaatggaatggggcttgcaggtggccccagaaatctgaggagaccaatgactaagaccagatgtgggtcagtggtcatcttggcaggtatcactgtggacagatgacactgagggccactcctctgaccttgggttgtcaactgctacctggtagccccacccctcccctttctacccctagaccttggcctccagggaaaaagtgtgtgtaggaactccctctgccattttgaaaagacaggagctaaaagcagttccatgaaggacaggcgtttcgtttcatacctgagtttgtgaaataagagttgttcttgctacacgtgatttttacctttctgtcttctccattgacttagtaatgagacagatcagcacgaggataacttgtagccatacacctggcaggttctgcaagtcagagaactgtaaccacatgctgggccttagagcaatcttagggcacctgcttttctcctgcctacccattttatagaaaaaacaagagaggctccttccgtggctggtagcacagggcaaagtaaggaaagggatgtgccagcagtgggtttgaatgaggatctgggtgaccagcggtgaatgtatgttgtctgttagtccagaatctacatgctgggcacgttagggatccctctggggaggggcgcctttggcttgccttgttggtgtgagccgagcacgcgtgcttgtttcaatcctgaccgccggtcaatttgtggaacaagtcctcatcgagtgtttcattctggtccttggagcgggtggacaagaaaatgtagccgccaatgtactcgtgcacaatcttgcaatctgcactcaggcaggtgaaagcagtaaagacgttttggtcaaactcgatgaccacctggaagaggaaggcacagagaagcttaaactctgacaaggaatgatgaaaaaaaaagtgctttgctggactggcccctggagctgagggctgctgaggtggataacagatggatatccctctaaaacacacagaaaaccatcacttccattaaacgcttccagaaaacatctttgctctctttgcgccctctggtggtgtcgactttgctgcacgtctggttaaaaaaactcccaacacattttctgtctacagtttagatacaaggattttgcccaagcactctctgtctccctgtgttgaggggcagggtgcttcgcaggcactttatttttatttttattttttttttgagatggagtctctctctgtcacccaggctggggtacagtggcacgatctcgggccactgcaacctctgcctcccaggttcaagcgattctcatgcctcagcctcccaagtagttgggattacaggtgtgtgccaccacacctggctaatttttgtattttcagtagagacgggggtttcaccatgttggccaggctggtcttgaacgcctgacctcaagtgatccatgcctcggacccccaaagtgttgggattataggcgtgagccactgcacccggcctgcaggctctttaatgaataaaagtctgcctgaattttcctacagccactgcccggaaccctttcctagctgcaagtcataaactctaagcactagaagaaagacttagagactttgctggttcacaaccttggctgcccattgaaatcacttgtggacctttaaaaattactaatggttcgttcctcctcccagagattcagatttaactggccttgggtgtggtctaggcagtggtgttttaaagctccccaggtgatcctaatacgcatcaaggctttagagctaccgccttagaggtcatctaatctctgaacttgattttacaaataagcacccagatgattatcaacactgctgagaggaagtcagggttcttaacaaatgtgtgggtctcttaccatccctctacgtcagtgactttctattggaaaatgagaatgccaaaggaatgagggaagattgagtctgtatcagcaacatctgaatgttttaattaattcaagaatgaatgaaacagggtcttgctttgttacccaggctggagtgcagtggcacagtcactgctcactgtaacctcgaacctcaactgatcatccctggctgagtagctgaaactacaggtgcacaccatcacacctggctagttcagcgttttttttttttgttttttttttttttaattttctgtggagacagggtctcattatgttgcccaggctggtctcgaactcccagcctcaagtgatccttcccacctcggcctcccaaagcactgggcagaatgttttaaattagcggcaggatgctaagctgcctctaacttcatctggaattttccatgatacaggcttggcctgaacttagctcctaggatgggagatgatgggaggctgtaacataggctaggggtttgagggctcctggttttaagaggtgaagcttttctcagtcatcactatggacctcactttcttcttcagcagtttttcccttttgggcctggaatgctctccaggtgagcaactgaatcttccagtcctccatcgggtttcttggcagccagtcagatgaggctttttttggatttattttgcatagcagttacatctccagtagtttctcataagtaagtatcaagctaaatcctgtataatcctatgctgagtcaatgaaaattaatgaaactgctcagcgatttcagaacctgtctgtattgaaagtctgcatggagactaagccaacttgcagtgctaatgcaagagcatttggcctgtgcctgttaggaagctgcccagaattgcatatgatgattttagcagacagacagttaccatatgcttgtggtttcttaggtctaaatagaagaacaccttttaaaactcagaataatctgcaattctgagggacacacatttataggctcaacactgaagagcaaaaactttcactttacctgccgggtttcccagtttacattccactgtttgatatttgtgaatctccatgttgtcactggaatcccggtggctgcatcaattttaatcaacctgttatatgaaactcccagaatgtcatcttttttgcttcctttaaatctgaaaagaatcataatattagttaagagaagcaactgcttcctataatacaatgttcactcacatataacttcttaaaaatactaccagtatttctgaatcatttcagaggaatggacaatgaagaattaactttctgcaggggggcatttttattgggatatagacagcgtgaaaaaagaatgaaggctatcctgcagatggtctttaagtaaaactgacatcagagagaagaaaaataagatggaatcaaataaattcattcaaaatgattactgactctgtgttgggcacccttctaggcatgggagatatagtagtaaactaaacggatggaaaatttctgactgtgggagggagaagatcataagtatgaggtacatatgccagataagatgaaggaaaataaagttggaagggctacagggaatactggtaataaggtggttacagtttgaaacagggaggtcagtgaaaaggtgacatttgatcaaaaaatggatatgcatgaggatgtgagccgcgtggatatctggggaaagagtattccaggcagagggcacagccacttaaaaaaattttttttttaatgtgcttaaggacctgccaggaggcccatgtggctgacacagtgaaggaggggagagaaatgtgagttcaagagcaaaggtcttgtaggccactgtaaggatctggcttttactctgagtgagataagaaatccttcagattttgtgtgtgtgtgtgtcttgtagagacagggtcttgttatgttgcccagactagtcttgaactcccgaacttaggcaatcctcctgcctttgcctcccaaagtgctgggattacaggcataagctgtcacacctgtcccagatggttttgagcagaggcttcacaaaatctgatttagattttaaaaggatccctctggctgctaagttgaaaatttagtgggatcagggtagaggcaggaacaccaagcaggatcactctggaccggctctgtgatggtggtggtggaggaggaggcggaagaagtggtcggattctgtgtgtactttgaaggtagagtcactaggagttgcctatgggcaggatgttggtgtaagagaaagagcagagtcaagaatgactccaaaggatttggcctgaacatctagggcgaggagttgccttctactgagatgaagaagtatgtagcggggagccagtttagggggaagatccggaactttggacatgtaaagatgagatgctcattagatatccaagggtcactggatttatgaatctccagttcaagagacagttctgggctcaagatatatatttcagagtaattggcatataaatgaagtcaaaagaatggctgaacccaagaaggtgagtagagattgagaagaggaatgctttaagaactgaggcctggctgggtgcagtgattcacatctgaaatcccagcactctgggaggccgaggcaaggggattacttgaagccaagagattgagagcagcctgggtaacacagtgagatcccatctcctaaaagaaagttagctaggtgtggtggctcacaagtcgcagctacttgggaggctggggtgagaggatcacatgagcccaggagtttgaggttatagtgagccatgattgtgccactgtgacagagtgagatcctgcctctaattaaaaaaaaaaaaaaccaaaaaactgaggactgtgcactctggtattataagagattggaaagatgagaaagaaccagccaaggagaccaaaagaactggtcagtgagggaggagaaaagccaggaaagtcagctgtgttggaaggcaagtgatgcaagttggcaaagggtaaggggtgactcattgtgtcaaatgctgcggagagggtagctggtgcaaggactgagaggcgaccaatggactcagcaatgtgaaggtcatgggtggccaagaggtgaccttgatgacagaaagtagcaggggcagtggggtagggagggagagaaaacctaactggagtggtttcaagagagaatggaagcaaggaattggaggtagtaggtacgtacaatacattcaagaagttttactgcaaattagggcagagcttggggagagcagctggagggggttgcaagaaggggaaactgatgtgaaaaatgatgctgcaggagacagaaaagcataattttaaaagaattcctagctgaatatgtcacttttcacatcattcttatcttctgcatgtcacccttggttaaaatttactcccctgttctggaatgttttccacattattccttcatttcaccaccttaatgcttaatatcacaaattaacccacttcttactccacccgcttctctctaacctatgggagttccctgggctgctctccatcatccagggagcggtgaagcaaggacctaggtctctcgggtgtgggcagatcccgattccgccagacatcctacacacagcatggctgctccaggctttgactctgactgaccttggaaaaagcagatcttcgctacacctgggcccactgcctcaaagcctcacctccataaacaggtgttagagatagagggaggtgcagggggaagtagctggtaaaggaggagttgtcaccggaaagttgttcaggcccacaccacgcttcaccacgtatcaggcactttgcttgcaggctgcactggattctctcaacacagtaggttcggagagcccactggacacatggagaagctgcgcttggggagcgcagcaaaaatgcccgggtcacagagctagcagaggcagaggtgagactgaaagctgggcctggtcagttcaagtatttatgtggttttcactatgcggggttgacttcagggttacaggtgagtgtgtgtgtgtccgcacatggacacatatgcgcgcacatagtgggtatccagtacgactccgcgcttcctcactcctttgttggggtaagtaaagcagaaggagttgcttgtttgggacaaacgttggggactgatattcaatgagatatttcagtgaataggaaagtctgttttttctgttgttttgtttttgttttagagacagtctcactgtgtcgcctaggctggagggcagtggcgcgatctcagctcactgcaacctccacctcccaggttcaagtaattctagtgcctcagcctcctgagtagctgggactacagctgcacaccaccacgcccagctaatttttttttgtatttttagtagagatggggttttgctacgttgcccagagtggtcttgaactcttgagctcaggcaatccgtccactttggcctcccaaagtgctaggattacaggcgtgagccaccgcgcccagctggaaagtctgaatagactcccctgttagaagtaatggaggaatggagtctttggaaagggccaagaaaacaaaaactgccaatgattaaaaatacaaaccaattatcccaccccgaaattataagatgagaaagtgacagtacttgctgtactgtaggattgggggtagattttgcttaagcatcagtctccttttctgaactgaagaatgtaatttgatttacaagcatgcttgtggatatgttttgggaaaccatccattgtatacagtggggcagagccatagtgctaggcggggataacaaatgaggatgcagggctttatgccaagtgtgccctggactgggggtgaacttggacaagtcacttaagctgtctttctgggggcaatagatgggcctcctatgcatccttcagacccagaaatcttcagagaccagtgagaacagggttgctacctgataaacctgggtagaaataagacagagcttgcggggacctctctaaaaacctaacaattctgcaaagccacaccacgagacactatgagacacaaaaaggaggaagctgacatgaaagaaagtcgtagccaggtgtggtggctcatgcctgtaaacccagcactttgggaggctgaggtgggaggattgcttgagatcaggagttcgagaccagcctgggcggcaaaatgagacacccccccccccggccaccctccccacacccgatctcttaaaaaaaaaaaacaaaaaaaaaaaaaccgaaaagaagttacagatttcataaaatcaatatgtgatgtttaccctctggttttggaaatgtagttatcctaaaaaaaaccctccttttaaaatttcctttcccacatttagctgagtttcaggggtattggaacttagaacagaaggtatggaaaatgtttatgagcagcccaaagtgtcaggactatttataaaagggcaatattctcaaataaaaagcattctatattctatgctaaatgagaaaactggggctccccaaaagccacttaaaattgaatggaaagtgtgagaaacaagtgaacattgtaatcacctgacaaggtagtaggtgaggccaaactcaggcagtgactgccacgcctggatgaaccgcagcttggcttcgaccaggggcatctgggccacgttctggtgcgcctccaggatccgggcggccagctgaacagaaacagacatcaacctctcttcacatgcaccggctgctctgtgatcaccctgttagctccagatcccccataagaacaatacactcaaggtccgtctgcagctctacaaagacaatccattctcatccattcattctctctctttttctacaagatacaacaatcactggaagaagcaggaaaaggatcacccaacacataaacttctaaagttggtgcagttggagagctctggggtccctctgtctgaggtctgtggagtgtccacagacaatgattctacatgaatcagctcatctgtgcaacttttaacccactcctatagaagcataattttaattattaatttgtgagaactaaataagttcaatctgggaatacctacatgtttagtcagcagtacagtcacctctaacaaaattaacaataatttcataacatcatctaatattcaggacatagtcaaatttcagcatcaactgattttttcatgatgatactcttaattagatggaattactccttttttttttttttctgagacacagtcttgctttgttgccctggctagagtgcagtggtgcagtctcagctcactgcagcctccacctcctgggctcgagcaattctcctgccttagcctcccaagtagctgggattacaggtgtgcaccaccacgtctgactgattttgtatttttagtatagaagggattttaccgtgttgcccaggctggtcttgaactcccaacttcaagtgacccacccaccttggcctcccaaagtgctggaattacaggtgtgagccaccatgcccagccggaaatcctccttttatttctgtttgcataaagaatttactgcaaacaattgccctaacaagattaacagtacctgtttggatttgtgtctttttgcacaccgtggtgacacaaaacattctgggttcatatccatgttttcgagactggaagccacctgagatgcagagttcctgtttttcatcctcagaaatgaaaggatgttgaggacctctggctggtaggagctgtctgccatggttttgcccttcgatgccaacatgcaggcagccatccattgggcgtattgattctcctgcagcaaacagaaggttgagaagcaagctcaagtgcaaagccccctgctgcacacagagggggacttgggctttctaccccattacagtgcaaaaccatcaccttccaagcaagatgtgaagtggcacacgttgtgagtggctgctcatcagctaatgtaacacctaacagtagtttttgagtcctgtgttgagtttctagatgctgggaggctagaggataggaatgtcaactttgataaattgcatgcagggaatttgcatttaaagatgatccaagggccaggtgcggtggctcatgcctgtcatcctcaactttgggaggttgaggtgggtgggtcacctgaggtcaggagttcgagaccagtctggccaacatggtgaaaccctgtgtctactaaaaatacaaaaattagctgtgcgtagtggcagatgcctgtaatcccagctacttgggaggctgaagcaggagatcccttgaactcaggagatgcaggttgcagtgagccaagattgcacaaacgcactcgagcctgggcgacagaacaatactttgtcaaaaaaaaaaaataccaggtgtggtggctgacacttgtaattccagcactttgggaggccgaggcgggtggatcacgaggtcaggagatcaagaccatcctggctaacatggtgaaaccccatctgtactaaaaaatacaaaaaaattagccaggcgtggtggcaggcacttgtagtcccagctacttgggaggctgaggcaggagaatcacttgaacctgggaggtggaggttgcagtgagccgagattgcaccactgcactccagcctggtgacagagcgagactccatctcaaaaaaaaaaaaaaaggtccaaggacacaaagaagtgccatggggcacagataggtggtgaaaccgcaaactgtcagctttccttgatatgtatttctgttttcatatcacatctggtctctacgcccaaaagaaaatgatgaaaaaaattagctgatttcctatattatttgtatcctggtctatccttggtaaagactctaactctaaggtagcaatcatggccattatgggatcttaacaagtcagtggtggcttctattgctgtttaatttctgtgttttatttctgacttcagggagtgaacaggggtggtcctcagaagtgcaagggatacagttaaagaggggcgttcttcagtgcaacagtgggtgaggaacgttgaattactggcctcaatcttcactgcccctgataaggtttggctctgtgtccccacccaaatctcatgttgaattgtaattcccagtgttgggggagggacctggtgggaagtgattggatcatgggggcagatatacctctcgctgttcttgtgatattgagtgagttctcatgagatctgatggtttaaaagtgtgtggcacttcccccttcactctctccctctcctgtcacaatgtgaagatgtgcttgcttccccttcaccttccgctaagattgtaagtttcctgaggcctccccagccatgcctcctgtatagcctgtggaactaggagtcaattaaacctcttttctctcccagtctcaggtagttctttatagcaatgtgagaatggactaatacaccccccaccactgccatccacaaccttcgccatataactttacagttcctcccaccagggaggaattcccatcccttgactgcaggctcagtcatgtcttctgctttggccaatggaatgtgggtggaagtgacagtgtgccaacttcatgcctaagctttaggaggtgcatgtgttgctacgtgccctctcacacttctgccctcaccaagaggagaccttccctaggcagcctgggacccagaataaataaaatcagctcaaccagaggcacagtcccaccaaacctgtgtctccaaacccatatgaccagctgacaccatcctggatcatccaatccccagcctacctttcagcacatctttcagaaaacaatgtttattgtttttctttttctgggggaacagagtcttgctctgtcacccaggctggagtgcggtggtgccatcttggctcactgcaaactctgcatcctgggttcaagtgattctcctgcctcagcctcccaagtagctgggattacaggcacccaccaccatgcctggccaatttttgtatttttagtagagatgaggtttcaccatattggccagactggtcttgaactcctgacctcaggtgatctgcccaccttggcctcccaaagtgctgggattacaggtgtgagccactgcatggcaaatgtttattgttagaatgtcattgtgattttgttacactgtgattgtttgttacaaagcaatagctgagtgacacaatagtgctctaaatttgtgaaaacatttttgggttttgctcttaggcttagtggaggtgaagtgacttaatatttttggggttttactcacatggtcacatctcaaatacatttcattcataccatcggcaacagggattagtaacttgattccaaattttcttcctgctacatttacatcgggcacaacttcgcagcctgaaggacaaagatcagagacaaaactgagttctgaggcatctgttagataaacatcaggtgtgtatctgaaataaagactttgaatacaagcccctcagatttgctttggttttgaaaaatggaggagcaagctgataacattaattaatggataattagataaatcttatgaacaattaacatagataaagaaaaatgcttttcttttacagttttcttaaaaagtcaatttagttcattttcaggttaatgctggctctccaaactcatagaaaaaattgtggatatgaactttaaaataaatcaaagcagaaggaattctctgattgtcacaataatgtgagttgagtgtactggttaattaaatatttcaattaatagatggttatcaggacgctcacagtgaccttcagaaattagaataggcattaaagtgacactgaattaaatataactgttctggaatacagaaaacttttcaggatcttacagcacctcatgtgctatactcttggacatgaattaccaccacatcataaactctggacacactgagaaagatggaacagcagaatgcaaataatcatgtttactagactgcattcaaggctcatgcttggaagagcagctgcagccaggctgtcatttggaaaacagtgacactggttctggtggttcctctagaagtaagtaaaccgtgcctcatggtgtcgaaaccctgactttaatctgctcacctctttttttttttttttttttggagacagagtctcactctatcacccaggctggagtgcagtggcatcatctcggctcactgcaaccttcacctcttcaagtggtcctcctgcctcagcctcccaagtagctgggactacaggcatgtgccaccacgcctggctaattttggtatttttagtagagatggggtttcaccatcttggccaggctggtctcgaactcctgacctcaggtgatccgcccgcctcagcctcccaaagtgctgggattacaggtttgagccaccgcgtctgccctgacttacgatgagccacagcaagatatagggtactcttacctctaagatttagtttttctagtggttctccttgttcaagttccttatttttaaagtatgctatggatgtgtctttaaagataaaccaatattgtttgaaagcttttggtagtaacttcttgggcctgcaaattcaaagatagtgaatgtttaaaccaccacccagaaatgtggaacacgctgcagatttcaagcagatcagatcagatgtttgtgtcaaagaaaacacactttgttttttcaaaaataatttcaaattgctaatttccaagcgctggaaatgaaatgctgatatgtgatgtagattttaacactaagcctccacctggggccacacctggctctgctactgtctacacgtgtgtcctgggaaagatcctgcacttacctgggctgcgtgcactgcctctgtgtgatggggaccgtcgtagtctgggaacccagggcttttgtgaggacagaatgagttcatctacatgaagagcttatcacaacacctgatgcaactgaagtgttaactgtgatggtgtatgtgaggaaccgacatgaatctggtgacatttggaatctcggcatactttttgcatttgaaaaagctgtcgatatggacagcccaagcttcaggttaccatacatacaagtcagatataaacatgagcagcattttctgtagtttcctcttcacccttaagagaaactatgggagaattctcagtgaaccatggaaatcagcgatatctacagctagtcaatatagactctactgttattaaaaactattttggggaaaggtatccagctgtggtattggtatctgttggggccagaaaactttatacagtggactagacaaggttggtggtgccagtggcaggcctaaaggttgggtcattcaaaataggaaacgtgagaatgagctagggggaggacaggggttggagataggcagagaaaagaaattattagtatgcggtttgtggaagaaacctggccgtgggggcagatcagggtatctcatgccagaggggcggacttctgcatcaagaatgggagaagaaaggaaccttggtgttcctcttggagaagagaggaaccattcatatgtaatttggggcaatttttttttttggagacggagtctcgctctgttgccaggctagagtgctgtggcacgatctcggctcactgcaacctccaactccctggttcaaggggttctcctgcctccgcctcctgagtagctgggattacaggcatgtgccaccatgcctggctaatttttgtatttttagtagagatggggtttcactatgttggccaggatggtctcgatctcctgaccttgtgatctgcccgcctcggcctcccaaagtgctgggattacaggcatgagccaccacgcccagctgggacaatttttttaaacatgtcagtactagtctttccttagctaaacatatgttatccttaacacaaagataggaaagaagttgcacattaaaaaaaaaaagtatatgctgggtgccagtgccatcatctcagcactttggggagctgaagtgagagaattgcctgaggccaggagtttaggaccagcctgggcaacacaggaagatcacatctctacaaaaaaagaaaaattagccaggcgtggtggtgtgtctatagtcccagctatgtgggaggattggttaagcctgggaggttgaggctgcagtgagctatgatcaccctgggtgacagagtaaggacttgtttctaaaaaataaataaataaaatttaaaaacccagcaaaaccccctcagtgtattacagaagaatattacatataatttataaaataaatttgaaaaacattatatgaacttaacatttccaggattaagaaaaaacactgtattaaaatagtatttatttgctgggtgcggtggctcgtgtctgtaatcccagcactttgggaggccgaggcaggctgatcacttgagctcaggagtttgagaccagtctggccaacatggtgaaaccctggctctactaaaaatacaaaaattagctggccgtggtggcgtgcacctgtagtcccagctacccggaggctgaggcacaaggattgcttgaattcaggaggcggaggctgcagtgagccgagatcacgccaccgcactccagcttgggtgacagagcaagacttcgtctcaaacaaacaaacaaaaaccaaaaaattggtatttatcatgttgagggctgtagttaagacagttcttttttttgttttgttttttgagatgaagtcttgctctgtcacccaggctggagtgcagtggcgcaatcttgtctcactgcagcctctgtctcttgggttcaagcggtcctcatgccccagcctcccgggtagctgggattacaggcacgtgccaccacggccggctaatttttgtatttttagtagagctggggtttcatcatgttggctagactggtcttgaactcctgagagctcaagtgatccgcccaccttggcctcccaaagtgctgggattacaggcatgagcctccatgcccaggcagttctaaggaacatattgttgtttaatactcagattctccaaaatgaatagtattttcagaataataaagacagcacctttaaccaaaagatacaggtaataaggtcttggtttaatcttcagcctctaaatatttctctttaggattaagaatgaggccctacttctctgttctacctggaccttaagagtatcaagagatctcaagttcctcctcctatctcctgcctggaagttttgtcatctttcaggatgcttctgacacattaacaaagctaatcattgctgctgctctatgcagcaaagcctggggcagggtaggggaaggggcagcggaggcgatgctgggtggtgaatgacgtgcataagaacgagcgagacaggctctccaggctctcgttagaatttttttttttttttttgagacagggtttcactctgttgcccagactgggtggagtgcagtggtgcaatctcggctcattgcaacctctgcttcccaggctcaagcgattctcctgcctcagcctccccagtagctgggattacaggcgcgtgccactaccacctggctaatttttgtagttggttgtggatattcccctctaggtatttttgcaactacatatgttagggcttcataggttttgtcatcccggatcagtttctattttatgttttcaggattcccttattacataaacacataagacatttaaatttgtatctaggctgggcatggtggctcatgcctggaatcccaggactttgggaggccaaaaagggaagatcttgagtccaggagtttgagaccagcttgggcaacatggtgaaactctgtctctacaaaaaatacaaaaattaaccaggcatggtggcacatgcctgtagtcccagctactcagagggttgaggtgggaggaccgctggagcctgtgaggtagaggctgcagtgagctgtgatcacgtcactgcactccatcttgggtgacagaacgagactttgtctcaaaaaaaaaaaattatatctacatctgtgtgtgacacagccttggctctgatttctcaagagatacttttcatttccacacagaaccccatgcaaggatgaacttccttactgctttctttggctaatgggtagtttttctatttttcattcaacagaagggcagcctttgctcatttccacctttaggcaggcgcttcagttctcacttcctgcttcacacaggactgaaaggttcatcttctatccctacatgggaattaaaatcctagcctcaaaccatgacaacctgtctctattccctaaattcctctgtgtggctgatgctgcgtttgtagaactagattcctgcctcatttcctgtaagttggcatttctgtttcacttcatgattaattctgtatttataattcttttattttatctagcatgcatatgtattcatagcaagataagagtttgcattagagctgataccctgttgctagaaactgaagtccactatttatatgataaatttaatagatttttttaaataaaaaaagagcttcactgtaatagaaagaacttaaaaatcaaaggattagttcaatgctcttagtactgatgaggaaagaaggtctagggaaatgaagggcctattagaggtcccaccttaccaggaatagagttccactctcgaatctccctcccctcttccctcctacgagctctctctccttccttcatttgtttcttctttccatgaactatattatatattcaatgcaacatcttgagaccttagatagtatccactggccaaatatgagggcaattttgagagtataagtcacaccgaaagcctgtgacagttcagggtagcataagtgatatggattcaactccagcatcactttcttcatcagaaacatctataggaaggctacagtcaccatttggttcatgaggggcttgatttgccctctacagagaatgtggcaactcatttttttgtggaacaattatgaatactttattaagatgtacttgtggattcaaattgttacttttttcctgtagctctgattataacaatatgagtgaaatgtggttacaaccatttatgccagggaagttaaatgaatgaccctgaccgggcgtggtggctcacgcctgtaatcccagcactttgggaggccaaggcaggcggatcacctgaggtcaggagttcaaaaccagcctggccaacatggtgaaatcctgtctctacaaaaatacaaaatgtagccaggcgtgatgatgggcacctgtaatcccagctactcgggaggctaaggtgggagaattgcttcaacccaggaggtggaggttgcagtgagctgagatcacaccattgcactctagcctgggtaatagagtgagactctgtctcaaaaaaagaagaagaagaagaaaaaagaatgaccctattgtttgcgaccacatcctacaatcacagtaagaaatccccaaaaccatacctgtagaaacccagtgacaaatattgttacctttggacacttgtttgtcatttataccggcttcattgctcattctttctaattctttctttgcatcatgtgttatcaaaagcaacttgtgtttcctttaaagccaactgccccagtgaagtgcccgttggttaagaaaagtcaacaaaccataaagtgaaataaggaactgacaggacttcaaagagccttgtttctttcaacctaacatacgctggcaccattgcagaggtggcagttcattatttccatggaaaaataaaactccttctctgcctttttagcagtttcaggtcaacctgaggtgatggaggagtttatcagaagtacttaaacaggtagataaactaaggtgactactctctgtaagcccaggatcaaagttctagagagaaatggcttttaaattataagccttcaaatggtatcagcgtactgagcctcccagatggaacctactagaagctctagtatggcggatgtgtttattattgctgatgtgaacccagccattcactgagggttcacgctgccattcactgagcatgtactatgaaccaggtaccacgctcagtgcttcatatgcattatttcattgaatcctcccaacaagcccaaggggaggtatattcccattttatagattggaaaatggaggctcagagacataatatattgctcaaggtcacctagctggtgtgtgtggtagagctacgactcaacccattgtttgtctgatggcaaagcgcacattttacctttgaaccatgaacctgcctcagggatatataatttaaactcctgcactctttatcttcaagactttgttatgagtaactccttttccccataaaagtttacttacctaaataatttgagattatctgcaagtttagggatatcagtaatgtcctcctaagaaaaaacaaataaagtttcaaaagcaggaacttcataagtgatgctgatactcaacctgcactgtctaatatggcagtcccttgctatatgtgcctatttaaatttgaattaattcaaattaaataaaatgaaaaactcagttcttcagtttacactcgctacatttctgatagttaactgggtgtgggagtaaggaggattgggaggagaatgggggccctgttgaggtcccctaggtggctggcaaagttctgtttcttgatttcagtggtgacttgggtgacaattgaatactaatttgttaagctgtacatatgtgtatttttcacttttctgtttgtgtcgtagattacaaaaatgaaaaacgagatgaaaaaaatgaaaaagtggatcaagtactccctataactatcattcaagttaaaaatctgaattagaaatgactacttttatatgcaaacaaaagattttataatttttatataagagtgggtaactcctgctacacctaggtcactgattaaactttcaaagtgaaccttgttcaaagttcattctgtaatgtaggctggtgcctgttttcaaactgaaaagcctattgttagcatcacgtaaaactattaagggagggaggacataactttttatttattctaaaaagaattactttcctgttgtatttattcagcggagaaagtagacaacagagaactccaagttcatggggcctatgtcttctataaacgtgacacagggccctgcatctctacagaatcttggcgtttagtttgcacgaagtatttgctcctgaatgagaccagtttcttattttaggacatttaatgataagagaacatacattgaatgcagaagaatatagtaactaattctaatccatgattactgcttacatctaattatggtggacccacctctctgattcaatgtgattaataattattcccatggccgaagttaaacaaaagtgtggcacctcatgagtgaattaaacaggaggggcatttcagttataaagctgacattcacctttcatggataaggagaaagagatgacaaaacagttttctttgttttattggagggttttcgtttgtctcctgaagtcaaaagcattcagaaactttttgcaatgttccagaaaaaggccacaactttggtcaagcttgtctggttgaaatggatgaccaagtaaatagaaataaggtttttatcggtaaagaattttcttggccggtcacagtggctcatgcctgtaatctcaacactttgggatgctgaggtgggagagtcacttgagccctggagttagagaccagcctggggaatatggcaaaccttgtctctacaaaaaatacaaaaattagccaggcacagtagtgtgtgtctgtagtcccagctactccggaggctgagatgggaggactgcttgagcccaggaggctgaggctgcagtgagccttgattgcactactgattgtctcagaaaaaagaaaaaaggaaacaattttctttattctattctcacagctgctccatgtaatagacagggtggtattttctagacttaagtttagggaccaagtccacattccatgctagtgaagtggagccctcagcagtggctccttcacaccatgccaacttacctctaggaagaaatataacacaaaagtattgtcattagtagagatgaaaatatagtcccttgtggagctaacccatgaaaagttagttcactaggttgaagcttgttaggtgaagagcatctttttttttttttttttttcaaaatcagatgaaatattctcttctaataaagaaaagttcatttatacttgtcaatcagaagaaagccacagttctgggtgatcagaaaaagttcataccaaaaggctgtccgcttttccaccttctagggttacttccaaattagaaagcgccgcttctatttcatcaacctcggactcgcctgcaaaatcctgtgtttcagcagacaacgacagtttgctaatgtggtactaaaatgaaaacagacgttttagaaatgttataaacagaaatgttataaatataaatgaatccattagccatttttttctttgaggactattcccttggaatactgaacatctcctaaacagaggtctccttcccgtgtggggaaaatgacattttaacctgaatcgttctgaggttcatggttagtcatgttacaactggctctttctcatcactgattgtgctcacagtagggaagagataataattgcaagactagtgtcttacagaggatgtgagcgtgtgtggattatgaggagcattttaaattaaaaatttgttctggtctgaagaagaaagcaaaataaaaaatacagaaaacaattgctctccttattttcagatatttcttcaaagaacaaaaaaaaaccagtatgaagcatatgaaacttcaagcagaacaaacttggtttgtctccttccagagaaaaggtactgaagttcccatacctgtagagctgcaaagatcaacatttcttcctctgtgcaatcaatttcttctaagagaatggcccacctggcttgctcatagagttggtttattcggacagcatcatactagagacaaaaacagaggtgtgtgtgtaatgaggtatatttatatcccacaatacaaagattctgaaacaactgaggccattctctgttaatcagatgcagcaaacttcagctcaggtaagtgaaaggaatacttctattgtgccatatactcagcactttttttttaaagtttttttttttttaattttttatttttttgagacagggtctcactctgtcgcctaggctggagtacagtagtgcaatcttggctcactgcaacgtccgcctcctgggttcatgcaattcttgtgccccagcctcccaagtagctgggactacaggcatgtgccaccacacctggctaatgtttgtgtttttttgtagagatggtttcgccatgttgcccaggctggtctcaaactcctgtgctcaaacgacctacccatctcagccccacaaagtgctggaattacaggcgtgagccactgcgcctggccctctggcccattttacttccagggctgctgctgcttcttcacaacccaaatttgattccattattttctctctcttttattactacatattggtagtaatagatagtaaaaatggtttatatgataaacagtgtaataagtaaacagtgtaatagaagggatccccatgctgatctgcaagcccagtgcaatcccaagcagaatccgataggattttttaaatgaaactttatacaagctgattctcaagttgaggctggtggaagacataatgttcaaatattgccaagaaattgaaaaagaacaatgttgagtaaagcacttctcctcccagatattaaaacctattataaagttgcagtaattaaaatggtatggtactggtgtaatgattgataaagtatcaataaagccttatctagaaacagacttatatatgtatataaatttaatataaaatattaattttatattaaaatataaaaatgacattttacaccagcaggggaaggaagaattcaacactataaacagtgttgaaaatgcctagccacttggaacacaaattgaaacaaaaaataactttacactatccaaaaatataaattacagatggattaaataatttaaacatataaaaccacaataagatactacttcacacctactagaatggctcttatctaaaagacaggtaataaccagtgttggtgaggctgtggagaaattggagcccttgtgcactgctaggtgtaaaatgatgcagcctctgtagaaaagtttggcagttctttaaaaagttaaacatagaatataatccatcaatcctactcctagctgtacacccaaacaaactgaaagtggcatccaaacacatacttgtacaacaatgtttacagcagcaatattcataatagccaaaaggtagaaacagcagaatggataaataaaatgtgctgtccacatacaatagaacgctattcagccttaaaaaggaatgaaattctggctgggcacagtggctcacacctgtaatcccagcactttgggaggcagaggtgggcagatcacttgaggtcaggagtttgagacacgcctggccaacatggtgaaaccccgtctctactaaaaatacaaaaattagccaggcatggtggcaggtgcatgtaatcccagctacttgggggagggtgaggtgggagaatcacttgaacctgggaggcagaggtttcagtgagccaagattgcagcactgcactctagcctgggcaacaagagtgagactgtctcgaaaaaaaaaaaaaaaggaattaaattctgatacttgatacaatatgaatgaagcttgaagatgctatgctaagtgaaataagccaaatacaaaaaaacaaatactggatgacttcacttatataaactatctagaataggcaaattcataaagacagaaagtagaatagagattaccaggggcaaaagagagaaggcaatggagaattattgtttaataggtacagactttctttttgggatggtaagaaagttttgaaaatggacagtggcccaacctgggcaatgtagcaagactcttgtctctatttttttaaaaaagtggctcttgtcactagtcccagcgacttgggaggttgaggcaggaggattgcctgaggccaggaattcaagaccaccctaggcaacatgatgagtcactgtttctaaaaaaaaaaaaaaaaaaaaaattatccaggcatggtggcatgcacttgttccagctactcaggaggctgaggtgggaggattgcttgagcccaggagtttgaggctacagggagctatgatcacagcctgggtgacagagagagactatctcagaaaaaaaaaaaagagagagaaaatggatagtggtaatagttgcacaacactgtgactatccttaatgctactgaattgtacatctaaaaatggttaaaatgataaacattatgtatattttacaataaaaaagtcaaagaaaaaatcccaaatgtatacatgaatattcatggcagtattattcataatagtcaaacagtgaaaacaatccaaatgttcattgattgatgaatgaatgtagtatacataaacaaggaaatattagttagcattaaaaagacataaaatatgatacatgctacaataggaatgaatgaatgaattctgaaaatactatgctaagtgaaaaaaattattcataaagtaccacattttgtgtaattccacttataggaagtttccagaataggcaaatccacagagacagaaaacagactgatgattactcagggctgggagggtaggagggaactggggagtgaccgctaatgggtatggagtttcttactgcggtgatgaaaatgttctgaaattagatggtggttaatggttgcacaactctgaatatactaaaaaccactgaattgtacatattaaacaggtaaatgtatggcatgtaaattatatctcaaaaagctattataaaacagctaaacagaaaaaccatgactattattagatggacacatgagggaatactttctgtaatctttaaatggggaagtctattctaagcaagacaagaggcctaaaagttgtgatgcataaggctggcttgacaacctaaaattaaacatttttaatggtaaaaaatatcctaaagaaggttacaaatttataaaatataggatacagattgaaaaaatatttgaaatatttgaataattaaaaaagtttgtaataaatataaaaaatgatgtccatcatatacacagtactcctataaatcatatgaaacatataaataatttaatagagtttgtggcaaatatataaacaggtagttcacagaagaaagcaaaatggccataaaaacattggaaaagatgctcaatctcactaattactagagaattcaaacgaaaacaagatgacctaatttccattttcctatcacatctacctacattacaaatactgataatgtttgatgttggtgaggatgtggggatatcagccctttcacagatgccgttagtagaaaggtaatttggtgacataaagctttaagcttttagtatcgttttgccctttgataagcacatccagtgttactgttccaaagaaatgcaagcacttgcgagatacttttacaagaatgttcagcacacttaggtcctgataaactacagtttatttagcctttcctttgattttttttcagtggttaaaaaaagtgagtctgacttacttatactgacatgaaagatagccatgatatgttttgaagtaaaaagaagcaagctacagagaaaacaaatgatcctacttatctagggaacacaaagtcttgaaaatctattcaaaaatatgtttgtaaacatgtctaaacaagtctgcaaggatggttggtcatgaagctaactgtggctgcctcttaggagaatggtcatgatacagaactgttttccatttttactctaaataatttctttcttattatgtttgtttgtttatttatttttgagatggactcttgctctgttgcccaggctggagtgcaatggcgcgatctcagctcactgcaacctctgcctcccaggttcaagtgattctcctgcctcagcttcccgagtagctgggattacacgagcccgcctccatgctccgctaattttttttgtatttttagtagagacaggatttcaccatgctgccaaggctggtctcaaactcctgacctcagacaatccacctgcctcagcctcccaaagtgctgggattacaggcgtgagccactgtgcccgccctatgtttgagttttaaaaaattaatttaattgtggtaaaatatatgtaacataatatttaccatcttaaccatccgcctactgttttttagaggcacggtctcaccctgtcatgcagggtgtagtgcagtggtgcaatcatagctcactgcagcctcgaactcctgggctccagcaatactcctgcctcagcctccctagtagctgggagttccctctctggaggcctgttcccatttctccagagacaatgctgcatcacaatgttccagatctttcacaggtcattgacaggcatcctataggacttccccccaatacccccaccccgagaactctttcagtgggttctccagtgacttagaaacaaattttttccttggtggggttggctactcataccctctccttggcccttttctttgcttaattgaaaatagagatgggcacggtggctcaagcctgtaatcccagcactttgggaggctgaggcaggaggatctcttgaggtcaggagtttgggaccagcctggccaacatggtgaaaccccatctctactaaaaatacaaaaattagctgggcgtggtggtgcatgcctgtagtcccagctactcgggaggctgaggcaggagaatcgcttgaacctgggaggcagaggttgcattgagccaagatcgtgccactgtaccccagcctaggtgacagagtgaaactgtgtctcaagaaaaaaaaaaaaaaaaaaaaaagaaaagaaaatagaaacctcaagctggaaaccacatgagttctgccacctctccactccttcactccttgaatccctgtttctccctgtctagtcagttcagtaaaccctccaccctcgtccatcattccaacaaccaacaataaaaataaataacaaaacctacttagcatagttttcttgctctttcttaagaaggggttactatttagatctaattatttaagattctctattggcccaggagcagctttcagtatcttccaagcctctttttagaacagatgtgcttttcctgtactgaacactaaaatactatgaactatcagagttctaaaatgtgtgtttttttaattcacaaattttgaacacatttaaaaaggggcaaaaggtatgtgataaatgaattcattatgaatgaatttgaaagggacaaaagagtgttcaataaaaagttagtccccctctctaccttgttccctggaaatggtagtttctctatgggctgttttgcatcttttaataatgcacctggagtctgtttcatatcaaaaaagagctgattcattctttttaaaaacaatatggtatgaatgtatcataatgtatttaaccaattctgtagctatggacatttaggtggtttccagtcttttcctaaaacaatataataaccgcccctgtatacctacatgtcagtttgcatgtgtgagtataactgtgctataaacacctaggagtggatttgctgaatcaaagctatgtagaactgtaattctgatactgccaaattgccctctatagactaatttatactttgacctgcaagcagtctatgacagagcccatttcctgacactcttgccaagatagtatgtaactttttgatctttgccactgtaaagcattgtagttcattttctatgaactatatatttacatcctttgctcattagtcttctgggttgttggtcttcttattactgatttttaggagctctttacatattagagaaattcatcttttgtttgtagtatgtgttgtaaagacttttactttgttatagttttttttttttttttttggccagatgtacaattttcattttttattaaaatgtaccaatcttttctggattcttcattttttgagtctattattattattattattttatttattttttgagacagagttttgctctcattgcccaggctgtagtgcaacagcatgatctcggctcactgcaacctctgcttcccgggttcaagtgattctcctgcctcgttctcccaagtagctgggattgcaggcacatgccatcatgcctggctaatttttgtatttttagtagagatggggtttcaccatgttggccaggctagtctcgaacttctaacctcaggcgatccacccgcctcagcctcccaaagtactgtgattacaggcatgagcccctgcgcccggctgagtctattatttttgaaatgttgaattctagcattttacgtatctgagattttaatcagcacctgttactaaggacctgtggccagtatgaatctctctgaaagccagagaagctctctagtcctcactgtagattttagtttctacttgtagggtgccttgtaaatttgcagtggcttcatgggtgttctttcttcttcttagatttgattgtagctgccacgagaacacaaattacatctaaaatttctatatccctctatttatgcagcacagagtaggagtcttaaacttgattttatctatagcactcataattttgagagagggggaagggaatactgccataagtactaaagtggttgaggatcacagtgtcctccaatgccatgtcccattatcctgagtcttcctgtcacctttgggttgacagtttctgtgtggctgttagattcaaatcggtttcactttttaggctatgaagagggagctcctcaccaattaagcgggcagaggctggaggccaaagagccagagacaacagcccttgtgaccctcagcttcagtgtccttgtccccttctggagtacgattcgtttgatttcttccactttttagacaaatacatatttaaccctgctcctctatatttataccaatgatctgccattatctggcttatttgactgtgaagtcacttacatgttcctaatggtttttcagggggcagatgactcagctgcattctttttagctcaagcttagttctgaagcagcggattgaatcgggggagtctcttggcaaagaaactgctggaagggtccccaaggaccctatgagtccttgggctgagtgatcctatcatccatcaggtgcctgaactgggaaagcctgactcacagcgtgtggggtgaggggcaaagaaagtaccagatgcagtctctgtctccaaggacttgattgtctatttgtagaaaaaaatccacagatgtggtgtgattagaggagtgagtcctgaaattgtacagtactcagctgtggctcagagaaggcaaaggcccatgtgaccgagagtagagaaaagctcctttctggaaagagtggaacctgaatgtggtctcagagcagggttctgattctggggttctcagacttggaagtttgattatcaggtggtccacaagcttgtatgaggaaacacaacctctccaattgcatcgacttcgaatggaaatttagcatttcctctcaggatgctaaaccacagcattgcagagtacttgtcactctgtgaccaccagaatcaagattttgttccttctgtatgccagttgttgctgctgtcttcaagcaaggctcacccacatcactactttgaaattatggtggttatgagaactacaaatcttctttattcaattaactaaaaatatattactatatacattttcaaaaagggtttggctactacagtttaatataagtgtttcattttgtagtcctatgtattttatctcattaatttgaaaacattattttaatatacaacagttttgagttctcagtacccagcttagttcttggcctacagtagttgctcaataaataaacacacaaacaaacaacagatggggcacagatttgaatagataagatgggaccaaattactgacttagtaactggaaaatgcatgggcatattttatgtatgtgttatctattttcagaaaaaatgtaaggcagtttattagaatagatggcatacaacaagatagcttaaattaagagttaagcaaggaaatgctaaagttgagtcatgaatgaggcttaaatataaaatcacaaaaaagtatggatttggttttagcaggcaatgaaaaaacaaaaacaaaaacaaaaaacctggacagttgcaaattcacagtagagttaaaaaaaagccaagccaattgcgtaggagaagcagtacagtaatttctcctggagattttatcgaagaaaagccaaaatttgcccttttgccatgattcacttatgcattccagacacaagcttggtccacaggataaaaatcaaggactgagcaggaacctctccttagaaatgacaagggacaaggtttgttttgaagatggcagttggggaaacagtggaagctgaggtgagcctttgcagaccagacctaaagtcaggaccaagaagaagacagtgcctcttacaagaggtggaaatgctggtgtagatgagaaagggtctgtacagaaaggctgaccaaggcaagctcctccaagtgtctggcagtaaatggaaaagagcaacaggcacaaaacagtgatgggagcatgcaacacagtgaccctgcgcactcagaggaccagtcatccagtttatatcgtcgacactgggccattgtaccgctgactctcagctcttcaaaagggctcatcagaaggaaggaagaggcagaagttcaaaggacttatctcacccctcatttgttattctaatagacttcagggggagatgtgcagtgaaaatagaattggtgaccagctgggtgaccaggtgagaaaaaggcattacatagatgatccctttccctcagttccaaagagtaagcaagcactggagtgtggagtcctatgtgcaccatcatgtgatcctagcttgttcatgggaacctgcctttaaacctgacctctgacaactcctttccttcctcagcattaagaacttcagttctggccagatgcgatggctcatgcctgtaatcccagcactttgggaggccgaggtgggaggatcatgaggtcagtagttcgagaccaacctggccaatatagtgaaaccccgtctttactaaaaacataaaaattagctgggcatggttgcatgagcctgtagttccagctactcaggaggctgaggcaaaagaatcgcttgaacccgggaggtggaggttgcagtcagccaagatcgtgccactgcactccagcctgggtgacagagcaagactctgtctcaaccaaaaaaaaaaaaaaaaaaaaaagaactccagctctctgagccactcccatcttgtttgaccattcctgcaaatggaggggggcagtgcatgccacgctaggcgcaaagatcctcagagactccggctaatttggtagcagcttactgtgctcagtagcgaccaaaggataaaaattcagagaccagggtccatgtatcagtctcaccctgcagggctaaacaggcgatcacacaaataaattcatcctaattttcataagcaaatgcctccattttatcctttcatgcattcatattaaaaagagaaagacaaaagagaaaaagttgcttactttaggattcaagtcgaagaaagaataatatttaaatcgtaagagcagctgctcatcctcttggatgccttgttccataagggagcgtgaggagtctagccaactagaaaatgacagcatgagttttagaagccagtcaattttacatatatatccattatattattatgtcatatattatatactacatatatatatccttgaacaaaatcagggtatgtaatacagattgagtatcactaatttgaaaatctgaaattctccaaaatctgacactttctgagcactgacctgaggctcaaaggaaatgctcactgaagcattttgttctgctttgttttgttttgtttttgagccagagtcttgctctatcacctaggctttagtgcagtggtgcagtctcggctcactgcagcctctgcctcccaggttcaagcgattctcttgcctcagcctcacgagtagctggggctacaggtgcatgccaccatgcccggctaaattttttattttcagtagagagggggttttgccatgttggccaggctagtcttgaacccctgacctcaggtgatctgcctgccttggcctcccaatgtgctgggattacaggcgtgggccactgtgcacggcctcgctgaagcattttgaatttcagaattttggattagggatgctcaactggtgagtataatgcaaatatccccaaacctgaaaaagtgtaaaaaacaaattctgaaattcaaaacacttctggtctcaagcattttggataagggatactgaacctgtataacaaaaaatcagtaagcacataataatagcttatatttgcattttatcttacagtcttcaaagtgctttatagatttttttctcatggatactctaaagtaatccaatgaaggggccagggcagttcttattatctcagctttgtagacaaagagacttagtctgagtgacattagatcatccttaaagatcacaggcctcagcagggtgcggggactcatacctgtaattccagcaccttgggaggccaaggcgggtgaatcacctgaggtcaggagtttgagaccagcctgggcaacatggtgaaaccctgtctctactaaaaacgcaaaaattagccaggtgttgtggcacatggctgtaatctcagctacttgggaggctgaggcaggcaggaaaattgtttgaacccgggaggtggaggttgcagtgagccgagatcatgccattgcactccagcctaggcaacagagactctgtctcaaaaaaaaaaaaaaaaagtcacaggcttggttatggggccagcttgagaatccatacgtcctgactacctgcaccacttctccttttaccagatggtttgccccaatgccagctctgtattactgtctagaactttctgcaatgagagaaatattcatatctgtgctgtctgatgcattagccccagctgaatgtggctgttagtgccacattttaattttaattaatttaaaatcctgtccacatttagatatccacatgtggctaggggttcctgtacaatgcatagtagagttctagagttgagaaataaaaactggggaaagaggatgaccaacacaaaatcaccatcctaaaagagttgacagtctgctgggggagaccaagcctcaaataaagggacaatgtgatgttggagtgagcaaagtgtcaggacagagctacaaggagggggccgatcttgaaggtaatacttgagcaggagacagcatgtggttgggccttaaatgacaggtagggactgaacagttggtaaaggggaatggtcctggaggtgaggcagtgacagaaagaatgagtgtgcacccaggcggcacggggccatgggagcatgggaggacacggagacacctgttggggccagatcttctaggaaggtgaatgctgttgacgagtttgactttatctggtaggcaatggggaacaacagaaatggtagtttcagaaatagtttgggtgtattttctgagaccatttcaaacagagctcaaggaagttgctcattagaatgcctaaagagaagagcgacagctgggcgcggtggctcatgcctgtaatcccagcactttgggaggccaaggtgggcagattacctgaggtcaggagttcgagaccagcctgaccaacatggagaaacccaatctctactaaaaaaatacaaatttagctgggcatggtggcgcatgcctgtaatcccagctactcagaaagctgaggcaggagaattgcttgaacccaggggggcagagattgtggtgagctgagattgcgccattgcactccagcctgggcaacaagagcaaaactccatctcaaaaaaaaaaaaaaaagagaagagtgacattctacaaaagacaatgtaagcctggtgggtcaccttggatttatcccactggcccatggggaccaacacacttattaactaccctacatcccacaaaatatactttgcatatctgtagtggtaaagaattagtattcacagatagtaaatctactgagttacccaaacatgtaaatttaggcacactttaaatatactgaaatgaccaaaggctgaatttttcccctttgttgctaaaatcagcactaacttttgcaaataaagcacaatccctaggcctaccaacttgaaaatgaaacgtgacatcccatctcttactgtgtcggcactagctcagagagaagtaaaaggagccgtgtccttaccctgcattgagcttggctttatcaaccagagaccgaggctggtacatatccgcaagtgcttctggggactgggggggttggctgaatgcgaggatgctgcagttttgttccgtcaaagggctgtcactgaaccaagtcatggtggatgatgctggtgttccattgatggggtcatatataggggtcatggttttactgtataaaccaggacttactgcaaggcagggggatcaagaactatgatatgagaatccagggatataaatcttcaagaaaatattaacattacttacactaaaatgagttttgactttaaatttggcaccatttaaaataatataagtcaagctgggcactgtggcccgcgtctataatcctagctacttgggaggctgaggttggagaattgtttgagcctaggagtttgagaccagccagggcaacatagcaagacttcatctcaaaaaacaaacaaacaaacaaacaaaacccaaaaaataatatggatcatgatggtacagagattagtaatacacaggtaatggtcttatctgtaaattcagctcctcaaaagccttggaactcaaatatgtaaaagccttcaaaaatcaacagggacaaacattggggaccacctcttttctttcttttgttttttagacggagtctcactctgtcgcccaggctggagtgctgtggtgtgatcctggctcactgcaacctcaacctcccaggttcaagtgactctcctgtctgagcctcctgaatagctggaattacaggcatgagccaccacacccggctaatggagaccacctcttttctaataattcacagttttcctatttcagtaggagtcttggcactattagagaactggagacctcatagaatgcatgtacccaatatgtttcaggtagccccttaaacaaatagcaggacttgccaattttaagaattcagtaggctgatgatttataaatcagctggctctaatttgtacaatttgttcttttcattggaatacactatgcaagaaagccctcaatcttggccgggtgtggtggctcattcctgtaatcccagcattttgggtggctgaggcaggcggatcacttgaggccaggagtttgagaccagcctggccaacatggcaaaaccctgtctctactaaaaatacaaaaattagccaagtgtgatggtgcacacctgtaattccagctactcaggaggctgaggcatgagaatcacttgagcccgggaggcagaggctgcaatgagccgagattgtgccactgcactccagcttgggtgacagagcaagactctgtctaaaaaaacaaaacaaaacaaacaaacaaaaaatgaagaaagaaagcctcaatcttgcaagcaagctagagatttgattgttttgatataaaaagaaaaggatgcttctcctccagaattttcacctgccctcctcttgcatgccccataaaaaactgaattcaggaaagaatcacacaatgatagaatcatgaagagagaagtgtatttgagtgatttaacttatcttttttcttttctttttttttttttgagacagggtcttgctctgtcacccagcctgagtgcagtggcacaatcttggcacaccgcaacttccaccctcagggctcaagcaatcctcccatctcagccttctgagtagctgggaccacaagcatgcagcagcatgcccaggttatttatttatttattttttgtatttttaatggagatggagtctcaccatattgcccaggctggtctcaaacttctgagctcaagtgatccacccacctcagcctcccaaagtgctgggattacaagcatgaggcaccgtgaccagccagttacctgttttctaaatatcactcttttatcccaaatttgtggtcagtggtactaaaattttgcattcattggcaacatcagatatacaattcaagtaatgagttattaaacatgcttgatgaaaaaaagtctgaaacacatttctgttaattctaaacttgactagatagcctttcctcatcacatcagttctgcaattttatttctcctttgtttggtgggggtgggaggagagatatatttctctcttgagttttactgtacgttcaaacaacaaaacacctgtaacaagtcttacctgatgaacctgaagctgttggagaactctccaggtttagaatatcttcaattatgggttccttattatttttgtcttttttcttcttcttcttaaaatagtcaccagacggctttaacaaggaaagctcttctgatcttctaatatctagaaataaatattttttaaaaatgaagaaaaagtaaaaagaaaactccttctaagactcagggtcattttgtgcatttaaaatcatttctcaggaaatttctgaaaagtaaatgggactaaactgcatcccttttgaagaaacagaaggggaaaggggaacagagacctccaaagtaggtggggggagaaaacggtggagggagattcagtctagtgaaatttctggttagaaaaattattataaaaatatttcaaatgtatctaaagcaaagggaatggtataatgtccccttcatgggctccccagcttcagtcattactagcattatgctattcttgttacctatttaccaccaactttacctccctctcccctttcttcctgatatggtttggatgtgtctccacccaaatctcatcttgaattcccatgtgttgtcagaggggcccagtgggaggtaattgaatcatgggggcaggtctttcctgtgctgttctcatgatagtgaataagtctcatgagatctgatggttttatagggtgtttccccgcacaagctctctctttgcctgctgccatccatgtaagacgtgacttgctcctccttgccttcctccatgattgtgaggcctccccagccatgtggaactgtaagtccattaaacttctttcttttgtaaattgcccagtctcagatatgtctttatcagcagcatgaaaatgaactaatagacttcccttccttgctccctctccctttcctttttccagttttttaaacaaccaacaaaggtcctgcttccttttttctttatagatcacagatcttgaacgtctttcttttacacattgcccatcagctcattttatccctgtggtgacaccctcatgccctgcccatttcttcttggtcctcaccatttcagcacacctggcttctggcggaatctagaccatgcatctttctgccagaggctttgctctgatggctcaccagggtctgcactgcaacagcccacatattccgggaattaatgctccccaagagcaaccttcagtgactatccagggtgctgcataaacatccttaccctgaggctgtgtctacactgtctcccaggggtcaccagctgctgaagtgtaacctgattggtgacactcttctcttttcagtcttacttccctgtccccaacagtatttcctggcatcacctcccaaataaactatttgtacttgaatccttatctcagggtcttcttctgggaactgaaactatggtaatccccatttctcccattaatcaaatatatttataattgctgatcagaattgctgataacctttaactacactagtggctatcattccaggtaaaaaccaattaatttggacttttagtttctgagcagctttgttgaaggtaagtgcactgattccattaagttctctcatcatttcgttcatatactgctcagtgttgagactgagcctagcagtttagcttgactctccccagcagccaaggattgtcaggttgcaacacacgtgtgaccattccaaatgcataatttatacacaaactcggtcatgaataaaaaatttcactgtgagcactaaaagcaaaacaatgaaacagaaacacctgtatcttcaaggttaagatttgtgtcttttctgttcttcaagggaaaaaccactaaactgctgcatttgatttcacttcaattgataagatataaaatgcaatgattagaaatgccacgctgagcctttaaaactattacaaagagataatcaggaaaagagaacatctgactgcttctgtttacttgaaaactttacatttttggtatcagctgtgatgtgtgcttccagtccactgtggtgtatgcaatatactattttatgtaatcatttactttgctttcaaatcctcattagaatattaccaaaaacacaaggtgtcctcatgcttgccatttgcacaccagggacaagactgcaacttacattctgtaatgaaagtttccattcatttgttcactcaacagttattgtatgctaggcattgtgactggagtgaggaatgcagagatgctcaggaaacggtttctgctctcaccctacttcatataccataccagcccccactgcccaaccctggcattcccaatcctgctcatactttttctcttttttggggtactatccatcccattttaacctcttatattcttttttaacttgttccatttatattttaaaatttgttacatttacatttattggttagtgtctgtctctgcctgctaaaatgtaagctccaggtggcagggattttagctctgtattgctactatatccctagcactcaccacaatgcctgggacacagtaggtgctcaataaatatttgctgaatgagtgaatagtttatggtttaatgggaaaaatagattactcactatatatcactatatattatctattctgggttcaaatgttgatttttggttttggaaccaatgaatacacctataatactttcaaaaattataaaatgagaataccttcatggggtgtttccttccctttatggagttttataaagaaaaattggtttgggtagtgttgtctttacgactgttaaattataggataccaaatctataaataattaggtttaaattcacaattaagtgtacttttctgcttaatcacttcataagtgatttttatgggcagagttatttacttgagccaggtcttaagcaattaagactttggaacaccattatctcaaaaacaataaagacacatagctctatggtgattaagtatttaatacaactctttaaatcttaaatactgtacaataatgtttgagtatagcttggatcaataaattttggggggcaatcttagtggtttatcttgtctattaacaaatctcttttggaatagttttaagctttgtggagatgtacctgatttatgccaataatgttccacttggcttaactccacttaaatggctgcaatacccagaagggcttaaacatgtgcttcctaataggtgagtgttctgtagcaattacttgaagtaggcagaatgcacacataattttcctgtctagctttgcaagagtctacagggcacaggggcctttcctgggtacttactcaggattttgcagatatcactgacagctttaaaaaccacagctgagaagctgactcgcaacctcaccatcttcaaattcggcagacgaaggcgcagcattttatgctgaggggtgaagagaagctttgcatctgcctggaccccatatttgtccagggtccagtgggttttcagaagccagcaatgcttctgttcccaccaaagagcaaagtctgaccagtcttgggatatatctgcaaaaatgaaagcacaattaagtaaaatgagagagggcccagcttggagggtcctggagctgcagagtcaatttcattgtgtgcgaaaatggaaaccaacaactgatctccagctcctcatggccttttacaattcaaggcttaacaacttttggcttctttccaaagtctccagggaaaaaatagggactgggatggcattaggcaaaatacctaatgtagatgacagggttgatgggacagcaaaccatcatggtacatgtatacgtatataacacacctgcatgttctgcacatgtatcccagaacttaaagtaaaataaaaaacatttaaaaaattaaatcaaataaaaaaatttaaagataaaataattaaaaaagaaaaagaaaaaataatagggtcgggtgctgtagctcacacctgtaatctcagcactttgggaggctgatgcaagcgatcacctgaggtcaggagttcgagaccagcccggcctacatggcaaaaccctgtctctactaaaaatacaaaaattagccaggtgtggtggtgcgcacctgttaatcccagctactccagaggctgaggcaggagaatcacttgaacccgggaagtggagattgtaatgagccgaggtcacaccattatattacagcttgggcaacaagagcaaatctctgtctcaaaaaaaaaaaaatggaaaatagggactaaatcttaccatcatttacatttagataccgtggaggaaaagaaacataaaaatgtgttcacaatgaatgctaaagttctgttcgctaaaatctctgtgccatggccctttctgagaaagcatctgactttgtttaatcaagattatttctcttatagaaatgtatccttataccactgtgtcacaagggagtagcaatagcctccaatcaaagtccacacagaagtactgtacaactgacatttcattcttctcagtaatctccaactctttatcagtaccaccatatccaaagtgtccaaattgaagtcagagttaaaatattttctccctttcaatgttagcaccaatgtcaatctttcccctcctttaacgttggcattaaaatagaatctttacccttcatcaatattggagtcaattttcaatcttttattttgcaaaatgaagagttaccagtatctttgttttcttatttttctttaaatgattttttctttctcttttaaattagaaactctttttttttgagacagagtctcactctgttgcccaggctggagtgcagtggcatgatctcggctcactgcaacttctgcctcctgggttcaagcgattctcctgcctcagcctcccaagtagctgggattacaggtgcgcaccaccatgtcagtctaattttttttttttttttgagatggagtctcactctgttgcccaggctggagtgcagtggtgtaatctcagctcactgcaacctctgcctcccgtgttcaagtgattctcctgcctcagcctcctgagtagctgggattgtaggcacgcaccaccatgcccagctaatttttgtattttttgtagagacgtggtttcaccatgttggtcaggctggtctcgaactcctgacctcgtgatccacccacctcagccttccaaagtgctgggattacaggaaatttttgtatttttagtagagatggggttttaccatgttggccaggctggtcttgaactcctgacctcaggtgatccacccacctcagccttccaaagtgctgggattacaggaaatttttgtatttttagtagagatggggtttcaccatgttggccaggctggtcttgaactcctgacctcaggtgatccacccacctcagcctcccaaagtgctgggattacaggcgtgagccactgctctcagccagaaaatgctcctcttaatgctgttagtagaagcataaattggcacaactattttggaaaaccttatgaatcagcattttttttctctgaactataccacccaacagaaatgatctctgaaagacaggtgttacagcagctttttctgtaagtgcatgaaaatgtaaacaacccaaatgtccattaagaggtaaatggataaataattgtggcatattcatacaatggaatattatatggtaatgaaaacgaaccaaaacaatatgcaacagtatggataaatctcacagatataatgttgagtgaaagaaagtcaatgtgtaagagtatatcctttataatctcatttgtataaagttcaaaatcaagcaatgattcctgtggtgttagaagtcaggacagtggttacctttggtagtggtgactgggaggggtcggggtatggggcttgggtggggaacagctgatgttctatttcgtgatctgagtggttacaagactttgtgaaaatccattgaactgtttatgataagtgaagccttgtttataataagtgaatttttctgtatgtatattatatgtcagtcaataaggactgaaaaaaaaactatcttgctagagcaaatgaaaagcccgcatctaaggccttaaatagaaggcaaaagaagcacaaagaaaatagaatgttattaaattctaggttgataatgttgacatctgacacgctacaaggtgaagagtgtaaccctgaagatttctttctttgtttaaacagggagcatagtaaacggtggataagtgttgaaaaactcctcagcaccaatttatcactaagctctcaagtattaacagagagttaacccagtagtctaatgccaagctacttaaagtcacattagatgtcaccggtggaatgggtcccatccctgttgaagtccagcattatacctactgggaaatttagcttgccaccaaagactcaaggttttttttttttttcccccgacaccgagtcttgctctgtcacccaagctggagtgcagtggcacgatcttggctcactgcaacccccgcctcccgggttcaagcgattctcctgcctcaggcttccgagtagctgggattacatgcacccaccgccacgccaggctaatttttgtgtttttagtagggatggggtttcgccatgttggccagcctgttcttgatctcctgacctcaggtgatccgcacaccttggcctccccaagtgctgggattacaggtgtgagccacggcacccagcctgggctatttctttctctcctctgggatgaggggtgggggattgctctccagggcattacaagataaatgatcagaaaaacctacaccagccattagtggtgatgcaccagacagggtttctaatacagagaaaccgtaaagcaagagtaacttactgatctgttctactaacttgagcatcactcctccaacatgaaggtctccagatactctcagtgtgacgtctttctgctgctcttcattgggatggtcaacgcggaccacaagctcccaggaagcaaatgtaaagtcagtggatgacagcattgtggcaaatgctggtgtctgctgaacaaaaaggcagacatagattggaatgtgggaaggaaacgggacttgtcagtagacttgcagagcaaaatttcttttttgttttgtttttcattgtaacctcctcttcaaaacactctgcaaggttccaggtgctccagatatcaaatttggcatcttaactttgaagacaaaaagttttataaaaatggtctcaaatcatctaaatttacatacttcatttttccattcacccacttctccaagaccacttggctatgtatttccttcgtccacccaatgcttcaatcctcattttctctctattgacttcttttgaccttctctcaactattctggcaataggcaatcttccatattatcttttaaagaaatcaattttattaaggtataatttgcatgtaataaaatgcgcagattttatatactatagttcaacatattttgttgtatgcaaattatacttcaataaagttgatgtttaaaaaggatgccattaaagcctcttatctttaatatctttaatatatgtatattattacattcctcctacaaaaatgtatatcttcccataataaagctcaaaaaataaaaaaaagcaaaataattcctatttcagtcattataatatatagttttaccttaaatacatatagatacaggtcattaataattattgccatgtattcgatttacttattgttctatgtcatataaaaattgattataaatgcaccaattaaaaatttggatacatctttggcaaaagatttaaaaacaggagtaacagatataaaaagctcactcttcaaagtacagatagggatgtgaatttcaaacccatcgttttcccctcatgggagaagctagcaggaaagaacgttcacaactgaaatgtttcagggggtaactggaacactggaatccaaattggcagaactgaaacaaaacttgagatgtcagttctctcttacttttaaacagaaagaaataatgctactgctcctggctgttttaaacatttaaagtaaaaattatttaaatgataatgagtctttttcactttactatgtaaagccagcttatgagaaattcatgttttcataaggcctatttttaagaaacatcaatgcactcaaactcctaagaaagggcttctctgagggtgtacacaaatcccccagggatcctattaaaatgcagattctattcagcaggtctagggaggggccatacatttcttaacaggctccagatgttgctggtctgtgggtatactcagttcttcccttcaacctatttagatcaatattaaaccagggatgatggtaatatccgaggaacattacttttaataataattaaacaaccagtgtcatatctgttctgcatgttcattcgaaacgactcatttgtaagcataagagaatctcaaaatacgctacacagataaattgaatactgcaaatctgaacagatttaggacagattttatgggtgaggatgaaattcaagagttcagaagtagctccttatgtttttgttttgtttttgttttttttgagatggagtcttgctctgtcacccaggctggagtgcagtggcatgatcttagctcactgcaacctctgcctcccgggttcaagcaattctctgcctcagcctcccaagtagctgagattacaggcgtgtgccaccacgcccggttaatttttgtatttttagtagagacagggtttcaccatgctggccaggctggtcttgaactcctgatctcgtgatccacctgccttggcctcccaaagtgctggcattacaggcgtgggccaccacgcccagccgttccttatgtttctatagtcagaagcatgcaacgatgcaatgcatctcctccccatgcacagagatccacacagaaccctctgcatgaggagtgccactcagtgactgcattaggcctaactgcttgcctctgtcatcatcagcttcaggtatcatttattacctactgactgtatgatgtgctctgtgttaactcctgtcttctgttatccctttttcatcctctcagcaatctcatttagaaatgaggaaactcagcctcagagagatgaagcaagttgcctgaggtcacacagcaagttagatgctggagcccaggtggaaatccaggtctgcctttctatttcaaactcttattcaccacactgggaaaccactttgataatgttgcaatgccaaaatgaaagaaaactcctcaaactacgtgaactaaattctcagtagcctttactaagcatttctatcaacacaaatcttgcgcagtgaggagacaaaagatgccccttcatcgtcaaactcataacttggcattgaactgttcgactttaagatccttacaatttcttaaatgctataattgtgaagtctagttatttaaaatgttttgtatataaagaaaataacttttaaaggtgattccttactgcttatttcactgggcaatctgatataaggtcttttcctaacttgggtgatcaaaacactactcattcaggcaatagatgctgattccccttacaacaaaatgcaggctaaaattagccaagctggttttcctgcattcctttcctatctttctgtgccttcatttttgagtgaacgtctagtctgcagcaagctgttacttgtcaaggatagcagcaaacttcagccgggaaaacgcatctaaggagaccaaaacaagaagcaaagttactggcagagtgctgaaaagcccttcgcagacagtcaaagaaacgaaagcatggagggatggagagcaggaaggaggaaagatgagggggaaacagtccccgacccttcccctggaatatctgaaggtgcttggtgttcgaaggccacccgacctgtcttttgccagctctgcaggatcctggggcggatgttgggtggataaagcatgccccttactcccattaaggcagcacctgcggctgaactgaaagtttattttgcggccagatgcgtagggccggagaaggtggtcacatccagacgaaattattttcaatcaacagctatttaagtacaagaggctgcagaaagaaaggggctaagggggctcaggagccactggtgcccatgaaagcctcccaacctctagctccccagccctagctccggagcacccacctcctttccaggagcccgtagcgtccagcctcgcagtcgcgcacgtggagagctgcgtccctacaaactaccccgggccgagccgaggagcgggcgctggcgaagtggggagcggggggcgcccagtggcggcggctgctcagctaaggctgcggcaggtgagggctggagccagggcgagcaggcgaagctgcctcgggacctcccacggaggctcggtgcctgcccccagcctggcgcggcgtgcccggtgcactgcacggccccagcggcccggctgagggcagcgcgcagcgtggcaggcgagggcacgcccagccccgggcctgctaggtctcgctcccgcggagaggaggcgcagtctgcagatttttaagggcaaagggtggccgaagggctgctcggcggagagaaggcggcgagaacccggggcgcacgctcagtatctgcagctcctcttgcgatgtctcatcctgacgctttaaggccgcctccagtttccctgttcccccaggcccgccggggactagcccagatgattaaagccgcgccacttcccctcctttcaggcatacccatcactcacaccccggggtgcgtccaggcccaggagactccagcctcccgcctagaacagctgcctccctcagaaagagccccggagcacttgtggtcagggaggtgaaggcaacgacaaaacgattcgtctctgagtaagagggtggtgtcagtctccagaaggctgaggctcccgaccaggggagactccaggagacccaagggcaggctgcatgcggaagtctgggccacacctggtatggctcacctcaggatcaccaccggtcccgccagtcgccttcctgttggatttattttcaaagagggctggggccacccaggaagggtgggtgacctgggcagtttacacaacctctccaagcctcctttgttcatttaatcacatttgttgagtgcttactgctctacaggcctcccaatgggcctgggctcagagaatacagtggttaataaaacagacatggaaatgacagtttcctcatctgtgaaataggtacagagatagaatgcgtgctcttccacggagggatttcatgcaatatagtacaggctttagcgatttgcattaaaaggcttgtgaacacttaaattttaataaagaagttataaaatttagaagttgaatctgttttcgcttaaacattaccatattcaggaattattatgggtttgaaagtacatttaatttaaaaaggttagttgaacattgttggcaaatataggatattataattgaaataaaatcattaaaaacttgaaacagaatgtcttcacttggtagcgtttgtcaacgatgggaagggtcatctggtcccacttccctacctcttaacatcatgaaaccctgcttatggcccattagaacttagactgtggtcagtgcgcgcgcgcgcgcgcgcacaaacacacacacacacacacacacacacacacacacacatatatttttttgagatggagtcttgttctgtccccaggcaggagtgcagtggcacgatcttggctcactgctgcaccctccgcctcccgggttcaagtgattctcctgcctcagtctcccgagcagctgggactacaatttttgtatttttagtagagaccaggtttcatgatgttggccaggatggtcttgatctcttgaccttgtgatctacctgcctcggcctcccaaagtgttaagattacaggtgtgatccaccgtgcccagcctgtggtcaagattttatgtgtgaccttgaattatggctctatctattcataccaatatggtttttctcttttcaattgaaaatatctgcattgtgctaaagaattcgactggttttaagcgttcttcttggcctaggttaatttttaaacttgtaattttatgtagtgacttgtgtgtatataaatgtgtatcatatatatacacacccatacatatacacaatatatatagataagagcacaaatcgtgaatgtatagctgatgagttttcgcaaactgaacacacctgtatacagagtatataaagacactagcgtataaagagtgcccagttgaagaaacaggacatcaccagtcctcggaagcccgttagtgaccccttttagttattcctttcagttatgatcactgccgctgcctgcccctacccccgaccccaggcccaggataaccattatcttatcttctaactcctcagaagggttttgcctgtctttgtactttatataaatggaatcagaccatgtgcactattttgtgtctggcttcttgtgttcaacattatgtttgtgagttttatccatattatgtgtcctaggcttttttttttttttttttttttgagaaagggtcttgctctcccccaggtcagagtgcagtggcatgatcatggctcactgcagccttgatgtctcaggctcccaagctgggactacaggtgtgaaccaccgtgcctggctaatttttaaatttagctgcctgagctggtcttgaactcctgggctcaagccatcctcccatcttagcctcctaaattgttgggattgcaggtgtgagtcaccatggccggctgtcctaggcttttaatttaactttatgttttacttattacacggttactgtcgtttgtgtgacacaggtccaacccatcccccaaggtcctgggttagaagtgggttaaaaagtgtattctgaacttcaaaattttgtacatatatattaaaaaaagcacaccctttgcccccttaaaaaacaagcagaatcaattcactgagtctgttatttaattaattcatacatattaatcagcaatggattatttatttgctagtcactgtattactgtgagctagacatcgtaatatatgttgaaaatactcagattaactgggcacgcactttgtcttcagatgataggagggatgctaaggaatacagaagaatgtgtctacttctgccaggtgtttggagtggcagggaatatgagaaaaggcttcagaaaggaggtgatttttgagatggaatttgaaacattggataagagcttcatagtttcttataataacctgaggtttctagagaactgttttaaggtattaatatattttttttagttagcagatagttgcgcttcaggtagcagaagggtggaagataaagagaagctctatttcttgactttgaaatcttatacattcaagttgcaaatattgaaaaaaaaatctgttgtcaattacccatacactgataaactcacctttgaactagtaccttcaaaaaggtaaatcaactgggtgtggtggttcaggcctgtaatctcaacacctaggaggccaagacagtaggattgctcgagcccaggagtttaagaccagctcaggcggcataaggagacccacatctccaccaaaaaacaaaaaatcataaaaattatgcgatgatctgtgcagcaaaccaccatggcacatgtttactacgtaacaaacctgcacatgtacccctgaacttaaaataaaagttgaagaaaaaaatttttaaaataatagaaattagctgggtgtggtggtatgtgcctgtgatcctagctacttgggaggctgaggtgggaggatcgcttgagcctgggagatccaggctgcagtaagccatgattgcaccactgcactctaacctgggtgacagagcaagaccctgtctcagttaaaaaaaaaaaaaaaaaaaagtaagtcatgtcatgtctggggtatgggtagattagactgaatgagagatgtggccatattccgtattcactgaacacaaaagggaaataaatgagtagagaactttgaaagtctctgctgctttaacttgttaaacacaaatgattttttcctctagcacctttttgctaaaaattctatagagttaatttaggtagaataagaaagctgcttgaaggagaaaagaagtggatttttttttcctgattgatgattttgataaatatttacccaatataaagttctctattaagttttcagcttataaacctgctagaagtctgatgacttcaaaacggcaacagacacctaaaatatatttttatttgcattgagtccttggcacatacaaaatggcagctgtgttcacgtgtgcagtgaatacattttgctgagtgcaaagaagcagaatgtgcctattattgctacaccctcctccccaactggatggataatgagcactttctatgcccaggcaagttctaaagttttctccttgccagggtgaaaagggtgtgtctcaatgtacttacagggctgaatgacaaagagcaaagaagagtaaaaatggctttgctgggggccatgctggagcccacctttgagaatgagagaagcaagaaacacagtgcctccctccttccatccctcttctcctccatcccctgttctccttccttagattgcatccttcttaatcaaagggtacaagagagtatacagtgataattaaatcttcctcccatccttgattattgagttcccttccctagagataatagttacctgtttcccctgaaaccttccagagatagtctatgcatgtagacaatttctgcttcttatgcaagtgatagtagtctatacatattgttctgcattttgcttttctaacttgaaaatatcttgatgattgtagcaaatatcagtcatactcatggctgcccatcatccttggaatggcctccttaatatttgtggaaatctttatgtcttaatcccagtctagaagtcagaactcaaattcccaacctcgcttgcagcgagggcacaggcctatgacctaggctgtgtcattcagatactcaggaatgactttaatttgaaagtgagtgaggtgcagagacaggatgtacttggagcttccatcttttctgatgtgagtggtgtcaggaatgactatggtggtggtagtggcagtggcgatggttttctggaggctgaaaggttaaagtcccaatgcagaagtgatgtcagggctagtgggtggtggtagcaggtgcagtaaagtcaggttcagatgcttcaatggtgactcccttctcgtgttagtcctacagcatcatttcagactttgttcttggtgcttagctccaagcctcttcctcctgctgtcctgtcaggttgtgtccactatgatggagcaagaccctgtcatctatgatgatgatgacgacttgcctaattatttttctgtttaagctagccatagtggattctgttatttgtgcctaagagctcttactgacaaagaacgtgttaccggaagtgggatgctacaagtaacaacactaaaagtagaattgactaagtgcagcaggcaggcctttgagcaaggaggggacacacattacaggctggaaagctggtgactcttgtaatgcagtggcaaaattttgcttcaactactatatacaatacttgaagatgcacactgcaagctgagtgaggctgtgataagaggggaaatagtggggagcattcagaatgttggtttacattgatgacttcttgctctttcagcagtcttgatagagcagctatacccacaccagagtcctccagctgacaagagaggtaaggagagaaactgctttgccaggaggggccctctgctgcagctggaggtccaagttgaccgagagcccaaaatttgggctgagaaaacaaactaccactttattcaaaccaaagctggcataagtagctattgaagggaaatgaatacaacccttattataatagcactattatgagagtaaatgaaagagcccgtgtatgtgtcccatgccttcaaaatgctattgtgatttatattaataaattattataattattatgggtgtctgctgctgtctatatttctacctgactactgggtttagaatatggatacaactgctagcatggttgttttgagggcaactcaggtttatactttttgtagcccagcaaatagttcagtatgctttaaataaagtccgggaagtaaggggaaagtgagagataggaacgttgttccccactttgtcacaccttctaaactggaattacacattcatacctttcaccatgggatctgcagttccccccattggagtggagtggacttccctgcaccttgattttggtcttggccatgtcttttgctttggccaatgagcaggtgtgatacaagcagaggcttgaaatagatttgcttgtggttttggtttgctcttctatactcagcctttcaccacgggaagattgctctgccttgaggagatggttgattctagaagtgggatggaaaagcacaagatgagtctggaacaccttgtgatgccagacaatgaagacgtcatcgaaaacccatgggggcatgtcagaaggacacaggagtcacctgaaaggagatcctatgggccagtctgggacaatgggagcagcaaaatatataatggtagtaatggattataccccatagaataaaatattcaccagcccccctaacataaacaaaaatgggatcccagctaggttttatttaaacattttttccacgtttagaaatgctaagtgactggcttgaggccaccccgctaacagatgccagatttgggattcgaaccctgccctagtggctcccgtgctggagcttctcgcactacactgctctcagtctccatcctccgggcatctctgtatgagagcaggaacaagaagacagaatgttgccttgctccacctccactgggcacatccacgttagaggtgactcaatgtttttgctaccaactacaaaagcaccgtgagtactgattttggagttacaaatacattttacctagtaggtaaattcacaaatatgaaattttgagttacgagggtggactgtatggagatatagatttaacacccagaagatagagtaaaaagaattagaaatagttgcctctggggaatgggaggctggatgggaaggagaggggtgtggcactgttcagattgaataatttttcaaaaatatttgatatccactccttctcccagcactcctcccctccccccagtgggctggtgagaaatgtaatttgtcattactggatcttgcttgcccaatctccagtatctcaggaagatcccaactttactttagaaaagtaagagcttcctggaagggctctgtggattccagttcccactggtctctggaagtcttcattttctaagcacttacgtgaaggaagtgtctgtttttccttctgagtccagtttgggcctgagtcttgccctgtggctcccaaggccacctccttggcatcattgttctgggaagcggatggttcctggagtggggcaaccccaactacatagtaggaattgcagatggcacagttcttgatctgtagtgggtgggtgtaggggtggaggtgggggtggcgctaggttgatgagctcaaacttgcagttttctgtctcgcccaggcagccttcagcaattaccgcttgtaagcactctctatgtcccaggtacagtgcctagttctttgcatacattatctcatttaatcctcataaactaggagtatttcctcaccttacaggtgaggaaactgaagcttagggagtttaagcaaattgcccaagatcacctagttactaaatggcaaagttaggatttgaatttatccccatttaacttccaaaccattgccctcaatggcttacaagactttacacacacatagactcttttgcctatttccaattctatttagttttgataggttgagtttctggcagcttctgaaactgtgttgccattgtgagggcatccccttccctcagcatcactaaggatggtgtgccctttgttgtcttcctccttgtttggacagttcgttcttccatctggactgctctcccccttcctttcctcttgcagaattcctacccatcctttaggaactagcactgcaggcaggctgtggcaacaacagctgaaggaaggagaaattttaactttgagtaaagattgatattttaatgattacattgaactggactaaccattaccaaactgattttttttcttttttctttctgtttttttaatgaccagcagtgtctggagcacttttcatgatctaagagagcccagatgtctcatgaaagctatcctggttttcatccaaggagaggaaaataaataccccttctcctgtctcaaaaggcagaagggtaaacaaaatagctttttttttttttttttttttttttttttaaataacactacaggagtgttccttggccagtgtactggtgataaatatatttccataatacctaatgcaatgtgagctttgtcttgtttggatacaaatgatttatcttacttccactgagcctatttttttgaattatctccatttcacccccccagtataaggctgtgctaaatctttgtgcatgtgcttaattaattccttaagacaaattcgtatgagtggaattacttggttaaaggttatgtgtatttaagaagttttggttaattgccacatttcttgccagaaagattgtacctattaatattctctccagccatgggtcagagctcctctaagattagtatttattgttagcagacactgccttgtattaaatatttggactgtgccaagtgctctaccaggcccttgggatactgcttttgacatgtaagtgaaattgggcaggaagatacagcaaacaactgaaaataaagtatcgataatgtatgtgtttattgctttacagcttacaaaacattttcaggtactgtagttcaaggcttttcaaactataatgtgcatatgaagccctgggggagctttgtaggtttatgtggctgactctgtcttaagagggtgaaaaaacaaaatgaaagaagcttatgataaggatatggagatatagctcacagaatcaaggaaaatctcccaagtagactttgaaaagcacaggaactaaggcaagttgaaaatcaagggaatcccctccagggggctctttttggatgaaggggctctgcatggtttcaggattcatgtctgttattagttgaattttgttccacaaaaagatatgttgaaatcttaacccccagtacctgtgaataagaccttatttggaaatagggtctttgcagatataattaggttgagatgaggtcatattggaggagggtggatgccaatccaatatgactggcgtccttatgagaggagaagagactgagacacacagggcaaagccagccacatggtgacagaggcagagactggggtgatacctctgtaactcaagtaactccagggactggctgcaaacgtcagaagctacaagatggaggaaggtgttttagccagcttgggctggtgtaaaaaatataaactggatggcttataaacaacagaaatttatttctgacatttctggagacttggaagtccaagattagggtgccagcagggcggggttctgatgagggctgtcttccaggttgcagacgctgccttcttgctgcatcttcacatggtggaaaggcagtgagtcaggcctctggattctttttttttttgtgagacggagtctcgctctgttgcccaggctggagtgcagggcgccatctcaacccactgcaacctccgcctcccaggttcaagcgattctcctgcctcagcctcccgggtagctgggaccacaggcgtgcactgccatgcctggctaatttttgtatttttagtagagatggggtttcaccatgttggctaggccagtctcgaactcctgacctcaggtgatccacctgccttggcctcccaaagtcctgggattacaggtgtgagccaccacgcccagcctggattctttttataagggcactgatcccattcataagggctctgcccacattaccttccacttccaaataccatcccattagggattagatttcaacacatgatagcaaacattcagtcactaagagaagaattttcccctacaggtttcagagggagcagggccctgctgacaactcgatcttgcagtttcaccctcccaaagtttctgttgtttggagccacccagtccatggtctttgttacagcatctctggagacaaacagtatccctctgctccaggttcaaattccaaggagcagacatctgaggggctcagcctgtgttatgttctcatgcacaggatcatatttgcaggagtgagtggttctccaaagggtaaagagaggctgtggccaggattagggagactaggtgatggcagcaagaacaggagatgccccagcaccaacccaccaacccacgtgtgctgctggagcctcacgacctgggatgatgattgggaaatacgcaggctctttctgctccatggggtactttttggtccaagtcccacatggctggaagtgccagtgggtgagtggttgttctgtgcctttgaagccatttctggctccttctcaactgccctaacataggcctgctctataatgaggagctttccctcccccactcctcatcctgactcctggatccctctcatcctgcacctgtatcaccaactaaggtgtctgaatgaagaagatagtgtggtgtgtcacctgcagggatacatgggtgagtgtggtagaccatgttcccatggcacccccattccctcatgcctacagctgtcaatggcaaatatttgcagctctctgtctgaaggggtctctagctaggaagtttcttggcttaaaggcagagcaggacaaaatactggagaaattaacacccccaggagcagcccttagccaatgagatacagcagttggtgaatcaataccctagcatccttgtccacagggtgaacaactctgagattaattcttcacagttccccagagtttcctggagactggagcccagctgtccaccgcaataatctgctcatgaacacacctgtgactggcttcttgctttccctatctcatttccccacctccttcaggtgctccctgtgatatggttaggctttgagtccctacccaaatctcgtcttgaattgtaatccccataatccccatgtgttgtgggagagaccaggtgggaggtaattgaatcatgagggtgttttccttgatgctcttctcatgatagtgagtgagttctcacgagatctggtggttttataaggagcttttccccttcgctcagcacctttcctgctgcctcgtgagaaaggtgccttgcttccccttcaccttctgccatgactgtaagtttcctgaggcctccccagctatgttgaaccgtgagtcaaataaacctctttcctttataaattacccagtcttgggcagttctttatagcagtatgaaaatgaactaatacaccctgggatggatcacctcccaaatacgctttaaattcttgtctcagggtctgtgtatgggtggtctaccacacagtaaccctgcagtggtactgatgtgctttgccacaactgctgaaaagcatagaaaaagtactcgtctgtatgaatgtgcccagtaatggcttcagaacaccctgccccctccacacccctcacactgacttttctaagagataggccaacatagcaatggtgctggatatgaggtagcatggaccctttgttttgacagcccccagctaaattggggttccagtaccagagcagctagcagccctgccaggaaatggaggggagctgagcatgggtgtctacacgtgttttgcatcggatacttatttcacgtggtggatagcctaatgcttagttgtctcgactgttaccagggtgtccctcacgtgggaaagttgtttatattggcagatgtccttgcagctcttgctgacctgtgtccagtttctgcctgactgatgattgctctggcctgggagcctgccctcatgttctccctggcaccccaggcaaaacctggcctggagtagctcctggttcagacggaaggtgcaaattcagtacgccatcgtgataggaaataaatccaaagatttattacttactggccctgaaggccctccagcctcgggtcatgaaaagcagaaatgaagaggaagagtcaggcagaaagagatagagaaagagagagtgagcgagcacgtacagcaatgaacaatatatattagggaataggatgtggctcacttgaaattcacaggcaaatgtctgaatggtccatttaatggaagtggcaggaaagcggggagtctattctgctaggttggaaagacacggtgaagttcttatccccagctactggcttgggccatctgggtgtggttttctacttctaatgcccaggcagcaacctttgctgtgtcattccgttacacccctcctgaaaacatcccaccctggaacccttggtgatgttgctgtcacaggagagagaaatggggcccctggttacagcataaggatagcaacaaaggcctgagctttactctatgtctggaaaacgttatgcagatcatggtaacggggttaaagaactgccttaggtcaggctccctagaggcagagctttgagacggcgatccaggggcatgcggtttattgatggctctcaagggagagtgggcaaggagagcaggacaggcaggggaaggaaccaagccagggcgtgactcctgtaaagtctagcttgggcttgtagagcaatctctccttgagatgaatgggctggccttctgtacccctgcatcagtcagtcagtggttgtggccacctcaaggagagaggaaagttatagcctttcgggggaggcggtgcccatctgtcaaggggtcttgttggataaaggatgcagctctgaaaagatgcagacacagaagcatataaagcggaagggaagggcgcgtcagcctggtgaagggggcgtcagcctggtgaaggggtcctgggcaggctgcagtcggtgtttatgatagtgggtgtgtgtgtgtgtgatctggcaattggtggattctttttatttaaaaagttttaatttttaagttgacatacactaattgtacacaattatgaggtacatagtgatgttttgatacatataatgaatagtgatcagatcagggtaattagcatatccataatcataaacacatcatatctttgtgttgggaacactcaatatccgtcttatagctacttgaaattatagaatatattcttgtctttatagttacttttttttgtttttaaacatgtcgctgaagaccattctaagtgctatatgacactaacacttattccatctattaggtggtgcaaaagtaattgctcattttgccattacttttaataacaaaaaccacaattactttggcaccaaccgaataactagctgtaattttgtattctccaacaaatctctccctatcctttccttccccttcccagcttctagtatcctctgttctgtgcctggcttatttccacttaacattatatcctccagttctatccatgttgctatgaatgagaggatttcattttttttttttttttgtggctgaatagtactccattgtgtatacataccacgtttttaaaaacccattcatctgttgttagatacccaggttgattccatgtcttaggtattgtggacagcactgcaattaatcatgagggtgcagctggttggtggtttctatgataatctactattgaggacacaactgccttaattattcccttctctcctccttaatcttattcatagttaagaaaaatggattaaagaagaaacacagagaaagaagtctcatgattcagctaattcttcattcatttattcatttgctctcattcacccattcatccagaaaacatttattccatacctcctgtgtgccagggactatgccataaacacgtccaaaccatggtggtgcttctgtgatttctttcactggaaaaaattaaaatttatttacaaaatgaacattatcacaaggatccagatcactatactgagtctttccatttgtagaatcaccccctcgacacacatcaacccaaccatccatctaactcacctacccattcacccacccattgccctatttacccttctactctcccattcacaattcacccatctctgcgtttatccacttatctgttgtattacctgttcatctacctaactatccacaaatgaacacctctggcctgcctagcaatattcctaggctcattcgctgatttgttcaatcaatcaatatttgctgagtgtcttctaagtgccaaacactttttaggtgctggagataaaagtgatggataaaagtggggataaaatgacagactgccctcatgaactttgccatacatgtgtgaaagcagacattaaaccaatacttaggaagataaaatgtgaggcttcttctccctctctcctaatgtcctttttcctgaaatccctctctgtttgttgtgcttgaaagcattgattttggaaaatgtacaaagcacttagcatagaaagataactgggttggagaaaaagaacatcacttccggagatgagtgggatttatgtccactagattctaaaatcctggagggcacgaagagtgtatgtttcaattcctcactttatcctcagagcccgttacccagtaggcacaaaacaaatttttgctaaatgataaagagggcagaatcactctgtcattttctgagttttgactcattgaaatgtttaaggaaaatcatttttaaaaagaagttaaggaccaggcgcagtggttcatgcctgtaatcccagcactttgggaggccaaggcaggaggatcacttgaagtcaggagtttgagaccagcctggccaacatggtgaaacccagactctactaaaaaaatacaaaaattagcgggcatagtggagagtgcctgtagtcccagctactcgggaggttgaggcaggagaatcgcttgaattctcccaggagacttctcactcctgggaaaattcaagccagaggtggaggctgcagtgagctgagtttgcaccactgcacttcagcctgggcgacagagtgagacttggtctcaaaaaaaaaaaaaaagaaattgagaccttaagtactatttttgcagattcttggagctgttctagcagaggcagaaaatcatcccaggaaacagagaggttttgtagactgaaggatccagaattgataatttagagttgattgaattttaaggactcccaaagaaatacgtacaaataccaggaaaagatataagaaatactagtatataggaaacaaatactaggaaaagaatattctcaacacctctaagcttggcaggatggagacagtcaaacaattcggaggatattttctaactatctacaaatgagcacctacaacctgcctgacaacgttttaaagcaaatattaaataagtatttgcttttaaaatgtattttcttgtattataagatgcatgttggctgggtgtagtggcttatgcctgtaatcccagcgctttgggaggctgcgttgggaggatcagttgagcccaggaattcaagaccagcttaagtgatgtagtgagacctccatctctacaaaaaataaaaaaaattagcctggcacagtggtgcacccctgtagtcccagctatctgggaggctgaggcaggaggatcgcttggtccagggaggacaaggctgcagtgagctgtgatggcaccattgcactctagcctgggagacagagtgagaccctgtctcaagacaaacaaacaaacaaaaaactggtgtgttggtggtggaagattaagaatgcccaatgagagagccctgtgtggaaacccattcccctctcctcaggggaccacctgtattcttctactcactttttgggagagctcccaaaggaaccctaagctgtttctatggccctctgaccgtcctttactgagaagacaccaaagggaaacaaaaggcagttttatgacatgtctggaaggtggggcgttcagtccagcagcttaggactcaaccgagagacactggggcaggtgggcatatgtggaggttatgaacaaatacagactctagcttcaagaagattccctcagtcttcccaggtaaggtgattgctgggacccagacagccctcaggtagcactggggagggtggaggtcaaagaaacctcacaccccacacttcccagttgttgagtctttggaagcctcttaattaaagtccctgacatgcagaaacaagttatccattgctccctacccagaaatgataaccttgctaatattttgatataagttctttcagttattttttcctgtctacatgtagacaaacatacatagaaaagtatttttggcaataatggagtgtcatgtttttattgttttgtaaactgctctatttaaaggattaatgtacacatatttctatcctattaaatattaccagtcagtgggtatctgtttactctctagtgttatcatggtacttgctaaggaattttaaagattttttttttttaaattttactttaagttctgggatacacgtacagaatgtgcaggtttgttacataggtatacatgtgccatggtggtttgctgcacccaccaatccatcatcgaggctttgagccccacatgcattaggtatttgtcttaatgctctccctccctttgtcccccagcccccagcaggccccggtgtgtgatgtccccctccctgtgtccatgtgttctcattcttcaacttccatttatgagtgagaacatggggtgtttggttttctgttccttgttagtttgctgagaatgatagcttccagcttcatccatgtccctgcaaaggacatgaactcttttttatggctgcatagtattccatggtgtacatgtgccatattttctttatccagcctgtcattcacaggcatttgggttggctccaagttaaagatgtgtttatcagagttcctagtgttaaggagattataatttagctaacaagaggacatacacatttaaattggtatagcaataaaataataaaataacacaagacagcataataagagtctacatattacagcttggggaagattgttgttaggaatatagactcagatgacttgaaattatctcagtgatattgttcactatatgagtttgtcacaccatcatttttagtctgctcatcgacaaaataggaatgaggataaaaataatgctgatattgagggcttattttggggataaaataataacaatactgatagttatagtaatagtggcatttgcatagaccttaccatgagctgggaactgttcaaagattgtaacacatattaactaaccaaacacagtggcagccccatgaatcaggagtcacaattatccccattttacaaatgaggcagtgcaggcacagagaagccaagtaaccagctcaacgttgtatagctaagaagtgtcaggctggctatagccaataataatttaattgtacatttaaaaataactaaaagggtataattgaattgtttgtaatacaaaagataaatgcttgaggggacagatactccattatctatgatgtaattattatacattgcatgcctttatcaaaacatctcatgtaccccataaatatatggacctactatgtagctgcaaacattaaaaaaattaaaaagaagtggcgaagatgaaatttaaacccaggcagcttagctcttgtctggactatatatttgaaaaaggttttgaaactggaaaatgctatgtaagtggggttatgatttgttattggtgtaaatgaaaagttccaaacaaggggactaagcagcaagagggatgggcttcagtgcagggggctcactgctgatgtgagggcttgggcaggcttctgggaatggtggaccttagaatgggggcagggagcttctccacttggaaatcagcttccatcctcatctttcattagatcaagagtgaaatcagaaagaatgttcattgcaaatgaagagacccatttcaaactagctcaggaagaaaaggaatttattggccatagctgggaagtctggaggcatggctggatccagagattcacccaagacctgcctctttcctgccatctttggctctcttctcctctgtggtggcatcattctcgggctggccccacctggtggaaaggatgacctacagcagctccagcccaataaaaccgcacagttggagacaatgatttgttctgcaatgtcctgggaaggcttctcacagcctggctggaggcacgtgcccactcttggggaggtggaaccagcctcaaacaaaccacacaggctgagtgggctttctgtagaataggagaggagtgagttctccaaaaaaaaaaaaaatgggatgctgggcagacaaaaatcatgtctactgcagccttgccactggcccctgagcagcatcaacctgggagctgttagaaatgaaggttttggtgccccatccccagacccactgagccagaatctgcattctaagaaggtcccaggggattgctgtgcataatgaagtctaagacatgttggctgacagagggcttttagaaagacatgtgtggtttgtctgtctctctcattcttattccacacacactacgtacatgcttaaaccgttggctgccatcataaaaatggtcccaaccaggaaatgtgcaaaaaggcaggacaggtaagagcagtactacccttagattttggcaagaacccacaatgtagaggccccttgcaatggacttcttctggccacatccgtgccactgactagggagaccatcaggcagaggacagtgttcacctggagtccgcctctgctcttctaaacctcactttgggtacctgtacctgggactcaggaattccctgggcaaatgaccctgaacatgtttccaggaactgcacgggatcttctccagccattttactctgaccacccagatttcaacctgtccttaggagtaggacataaatgtgtgtacttttggcctgaaaggtggccgagggggcctcactttccttcaaacacaatccgtgctcctttcacctctccccctttctctcactgctgttgcattacctgtaaagcacgctggatttggtgaaggaaggaaaaatgaatgatccaagagaatgagaacgtggaagcagtttgtggaactgaatgaccctaccctaggtcttcaatatcatagcctacttcagtacacatgtttttctttgttcttacagaaaaatatcgcttgcctaggtttgttcatttaatacctgcatgactttttactttggcacggaatctccaattagtctgtgttagagaaaacagccagaataattttctttacctactttctatctgggacttggctgaggtgcatgtgcatgaggccactcatgatgtgggatgcagcccgaggagaaaagaagacggatgggctgccggccagggcctgactcgatattaatctataataggtgtagcaaatatttcatgaacgtggctggctgtgcatgcctctttgcagtaaaacactagaggtgctttatcaatggttcccactagatgtcgctgtcgtcacgtttgtaaatcctataaccctccttatcttccaccttggtttaatttcattagatttagaacataaatatgtcaatttttaagttggagaacagattttcctatatcaattcttagaatccttgctttatttttatgttgtcaccgacttcccgttacttttgttgtttctcttgcccattttgagcatacaaaggtctctgtacacaataggtgcttagtaacatttgaattgagttgaaaaaggggggtttctatggatttgagaaggatagtgcccttccattttaactttctggagcataatttatttatttattttttggaggcagagtctcactctgtggcccaggctggagtgcagtggtgccatctcaacttactgcagccttaacctcttgggctcaagcaatcctcctgccttggcctcccaagtagctgggctacaggcatacgcgaccatgcctggcttttttttttttttgtggagacagggtttccctatgttgcctaggctggtctcgaactcctgggctcaagacatccatccaccttggcctcccaaaatgctgggattacaggcgtgagccaccacactgctgttatttttaaaaaatgaagtaagtgccttgattacagggttttaagtaagatcttaagccaaactcagtgtgaattcacatggggaaaaatcactagcctctaacagaaaattagtatttcctttgattgtaaatgcaggcaacaaacacagtaacagtagtacctgggactatgctgccaatagaaatttcagacttttatattatattattgtaaacaatcttttaaaaaaaacttttgtttgaagttcagggacacatgtgcagtttcattatataggtaaacttgtgccatgggggtttgttgtacagattattttgtcacccaggtattaagcccactatccaattgttatttttcctgattctctccctccttccaccctccaccctccaatatgccccagtgtgtgttgttcccctctatgtgtccatatgttctcatcatttagctcccatttataagtgagaacatgtggtatttggttttctgttcctgcattaatttgttaagggtaatgacctctaccttcacccatgttcctgcaaaggacatgatctcatttgcttttatggctgcatagtattccatggtgtatatgtaccacgttttctttatttttattttgagacggaatctcgctctgtcgcccaggctggaatgcagtggcgcgatcttggctcactgcaagctccgcctcccgggttcacgccattctcctgcctcagcctccggagtagctgggactacaggcgcccgccaccatgcctggctaattttttttgtatttttagtagagaccgggtttcgctgtgttagtcaggatggtctcgatctcctgacctcatgatccgcccgtctcggcctcccaaagtgctgggattacaggcgtgagccaccgcgcccggaccctgcaccacgttttctttatccagtctgtcactgatgggcatctaggttgattccatgtctttgctattgtaaattgtgctgcagtaaacatatgtgtgcatgtgtctttataatagaatgatttatattccttagaatatatacccagtaatgggattgctgggtcaaatggtatctctgtttttaggtcttggagaaatcaccacactgtcttccacaatggttgaacaaatttacactcccaccaatggtgtaaaagagttcctttttctccgcaacctcaccagcatctgttattttttgactttttaataatggccattctgactggtgtgagatggtttctcattgtggttttgatttgcatttctttaatgatcagtgacctggacctttttttcatatgattgctggctgcatgaatgtcttcttttgagaagtgtctgttcatgccttttgcccacttcttgattttttttttgtaagtttaagttctttatagatgctggatatcagacctttatcagatgcatagtttgcaaaaattttctcccattctgtagattgtctgtttactctgttgatagtttcctttgatgtgcagaaactgtttagtttaattagatcccatttgtcaatttttgctttgttacaatagcttttggtgacttcatcatgaaatctttgcccattcctatgtcctgaatggtattacctaggtcatcttccagagtttttatacttttgggttttacatttaagtctttaatgcatcttgacttaatttttgtatatgttgtaaggaaggtgtccagtttcagttttctgcatatggctagctagttgcagcaccatttattaaatagggagtcctttccccattgcttgtttttgtcagggttctcaaagatcagatagttgtaggtgtgtaggcttatttctgggttctctattctgttccattggtctatgtgtctgtttttgtactagtatcatggtgctttggttaccgtcaccctgtagtgtaatttgaagttgggtaacgtgatgcctccagcttagttctttttattgcagacaatcttgaacattttattgcagacaatcttgaatctgtacattcatctccactttgaaattaaggtagttaccagttcaattatagatcttctagtatgttaaaaaagatgcacatgtattactacatcacacatttgtttttaaagtattttaataactgcattaaagtattttagtaactgtattcagtggaattagtttcatttggagtcatatgtctgtgattttatgcacttgaaagtgttatcctgaaaaagggtccacaggcttcaccaaactgactgcaggcagaataatggctacccaaagatgtccctgtcctaatcccaagaaaccgtgaaatgttaatgttatgtcgcaaggaggaattagggttgcagatagaactaaggtggctaattagctgaccttaagatggagagattaatcctggagcatcaaagtgtgaccagtgtcaccacaagggtctttataagtgaaagagggaggcaagagagttggggtcagagtcagagaagatgatgtggtgatggaaacagagatgggaataaagtgattgctggctttgaagacagaaggcggccataagccagggagtgtggcagcctctggaagctggaaaaggcaaggaaacacctgctgatgccttgattttggccccacaagacttgtttggacttctagcctccagaactgcaagatagtaaatctgtgttgttctaagccattgaatttgtgatcatttgttatagcagccataggaaacccatgcatcaacaaagaagtcagtggcacaaaacagttagaaaccccctgtgttgagcctaaagatcagagaagaatagttccatgtgtggtggaggtaggggaggcggtgaattaaggatttgcctattgctgcatgacaaactcctccaacatagcagctcagtaaacatttattatcttatagtttctgtgggtcaggaattttggactggctttgctggctggctgtggttctgggtgtctcatgatgttatagtcacattgtcagctggggctgccattgttggaaggctggaccagggctgaagaatctacttccaagttggcacactcacatggctatgggcaggaggcttctcgtccatattggtgtttggcaggaggccttatttcctcattacacgggcctcttctcagggtggcttgagtgtcctcacaacatggcttccggtttcctccacctcttaaaggaagtagtattaaagaagctatggacatattttaaaactactacaccatttccctgtctgtttgctcctttaaaaaaatttctgtgagcaaattgataccaggagaagaaaccaagatcatttggatacagaatgcaaatgatcgacaagacttatatctagaaattttcatttttatttaatctacttaaagccttaattaaataaaattacttaatagtaattgaagtcttaaagcaaagaaataaaattcttctttgtggaaattctgtctttacccacttggcctggaacagttttattaaaaataaacttttaatttcagaatatttcatagtttcaggttaacagaaaagttgccaagatagtatagagagatcttgtatacttcacacttaggttcccctcatgttaatgtcttacattactatggtacatttgtgacaacgagtggaccaatattgatatactactattgactaaagtttatactttatttggatttcattaattttttttttttttctctagacagagtcttgctctgtcacctgggctggagtgcagtggcatgatttcagctcactgcaacctctgcctcctgggttcaagtgattctcctctcttagcctcccaagtagctggaattacaggcatgcaccaccaagcccagctaatttttgtatttttagtagagatggggtttcaccatgttgaactcctagcctcaagtgatctgcccacctctgcctcccaaagtgttgggattaccgacgtgagccactgcacctggccagacttccttaatttttacccaatgtcagaatagtgcatttttagagtggagttttctccaggtatctctgatatcttaacagtatcagggctttttgaaaaagcaacaaaaccaagatgtgctgtggcatagaggacaacaaactctgggtagatttgaatttgaatcttgcctgtcattgccagctgcaggtccctaatcaagttacttctccttcctcacctcagtttcctcatctgtaaaatggaactgaggatacacgatgggaagaccaacaaatctttacaacaaaacttcacaacaaatttgttgtgaagatcaaacaaattcatgagtgtgaatcagcttggataatttttgacacattagccggttggggatagctattactgtgtggaactcagggtttgctgagataatctggcccagaacaagatccttcctatacaatgtggaaagtgcagagtccccatctgggcctggggataatgaataaggaaggcctcctgcagaggtagcatgaattgtatctagaagaatgggtgagagttcggtggaggaaggggcccatgcaatgggaagaagatatctgggaagagggacctgcctggcagaggcgatggtgtgaaacagcctggtagctttggagcaggcagctcagtggtgtgtggtggttgtgatttctttctaactcagatgaggtctgtctctctggagagtggttataaactctagcactgccctgacagggatcctggggaggtggttgtggatgtttaaagtgtgcctttcacaggataattcatcctagtggatggcctggtacctccgtgcccagtcgtgaccaggtgtccctcttaccttgcttatcctggcggtatcttgtggctgttgtctgacctgtgtccagtttatttccaccaagacgccgcactctaggagagctctagctgggaggagaattctgtttgggtgtgccagtcctgtgagacacagggcagcacagcacaacatatgctctaacagaagacatgtttactacttacagacgccagagaggagggcagcaggcctctccaggccaatgggaaggggagccagctgggaaccacaccctcaaccagagggtggggagcgggcgagggagaggaatctgagggctgaagcttttgttgggatccagggcattacccaggcaggtttcccatggggaattctaattggtgggtttagagcaagcaggcatgatttaggcggggtcaccctgcagctgagaggtggtcactgtggtcataagcacgcgctgtggggtctttgggaagagtcaattgggtggtatcctgctgtcccccagggaagtgctcaccaggaggtggttgcataaggcagatatctggatcaactgtactgaggaagtgggaagagaactggagactgtgtcaagagtgacaacactgctccttgtatgagaaagttcaacttatatttacaatggatatggaggcaaccaaaaattataagaattcactacagaggtggtgagtggccaggagctgggttgagggggagcttacaggctgtggtgtaataaaccatcacaaaggacttttagggcccaggtgctgaaggtggcagagagtgaaggagcctgactcctctggcccaccccccattgtttggaggagatgcctaatgaaggacaatacttgtttgggaatttatatgaatgagataaacttgtattgcattaaggtgctgctatttaggagttgttatggccgtgagcctaccctgatacagcctgtatggattgatgatatggcagggaagaatatcaaacacaaatagattttatgttttaaaattctggcctaaatttgcaaaacccagggagataactttgcctgtctataatgaaggtctataaagcaaactgcagttgctgctatgtaacagagatcacagtgggacgattctaaatcatttccaaagcctagaagcaggcagaaatgaaatgcggaggctttatgttcaagcttaatgtacttcatcacacaaagatgagactttaattatgttgtttccttggaagaaaattaaattatagaaagaatctactttttcacaggagtgtaaataaacttaagaaagaccacataaagagacagacaaaaaaagatttttatcagaccaagtgccatcttaatggtcaatcctgcattagaagtggagagacacaggtgtttttgtttcttgtttttttttcctcctgagacagagtttcactcttgttgcccaggctggagtgccgtggcatgatctcagctcactgcaacctctacctccctggttcaagtgattctcctgcctcaacctcccaagtagctgggattacaggcatgtgccaccatgcctgactaatttttttttgtatttttagtagaaatggggttttgccatgtcagccaggctggtctctaactcctgtcctcaggtgatccacctgccttggcctcccaaagtgctgggattacagatatgagccaccgtgctgggccgagagacacagttttatcaggtatttttgagcagtctttcaagagagcttacttgattacttattttcaaattttcaaattttttctcagagtaaggagacattttatttgtatttagaagtgtcttagattagcttaatatttgatgtgttaattttaatcttccctctttttaattaaaatatgccttttcctatcatgctttatcaattttacatatttcccctacaatgaggaagctcagtgtaacccatcatttcctatttataaacttttcaaagcaggaaccaaatttcctgaaaaaacacatctatgaaacctacaaagaccatatattaccttttttattgtatgtaatggatcttttagaataacatatataaaaatcaatgactagtgtgaaattagaacaaaattctttttaaaaagttgctgcttatcagctgtcctatattatgttattcccaatctttcctatgcaattcaaagttttagtttctaatcttattgtataactttttatttcctttctgaaaattgatcttacaaagaagggtttcaactaagcattcccttgaaaaatacttggataaaatgtgtatttcctttttagtattttaaactgtctgtaataactttatgctgtaggaaaaacctggaaaactaaataatcaggcataatgttgttccatgtcattttctggaaattatgcccactctgcctttcattctttaaaaaaatctaaatagggattacagataacttcaaatgagtacaatacatgatatttatgatgtgaaagtcaaaatataaaaaatagagacagatctctaacattttatttcggaaatgaagaattccagttcaggacatacacacagactacgtgtccttcagtatgtctgaaaaaccaagagcacattgggagttttattacaaagagaaatgttacatattgttttgaaagaaaactcttttgcactacagaagcttttgggagctggcaagctctgattggtgagtgtctgagttcatttagtgttgctataaaggaataccagaggctgagtaatttatgaagaaaagaggtttatttggctcaccgttctataatctgtacaagaagcatgacactggcatctgctcgacttctggtgaagcctcaggctgcattcactcatggcaaaaggcaaaagggagctgctgtgtgtagagatcaaatggtgagagaggaagcaagagagagagagagaggggaggtgccaggctctttttagcaaccagctctcaaggggtctgatagtatgagaattcactcactccctcaagcccaggaagggcgttaatctattcatgaaggatctgccctcctgacctgaacacttctcattaggttccacctctggcattggggatcaagtttcaacatgaagtttggaggggacaaatatctaaaccacagcagtgagtagcagtcttagagtcatggcagattgttttagcagctactaggtaaaactggtcttagggctgtagcagactgtttgagcagctggccttgtagaaaatttaattcttggagcaggtgctatatcacccaaatgcttttttcccctggccactcaactctgatttagtcaggtatgacaaggatgacccaatttgtataatccactttcataatgaagacaaactgaaatgggacatagagggtgttattttttttttctgcttcaacttttactttagaattggtacatgtgcaggtttgttacaaaggtatattgtgtgatgctgaaatttgggataggactgaacccatcacccagggagcacatacccaataggttgttttcaacccttgcctccctttctttctccccactctgtaattcccagtgtctgctgttaccaactttatgtccaggtgtacccaatgtttagctcccactcataagtgagattatgtagtattttgctttctatttctgcatagttcacttaggataatggactccagctgcatccatgtggctgcaaaggacattcatttgttctttttttatgactgcatagtactccatggtgtacatacgccacattttctttattcaatccgctgttgatgggccccagggttgattccacgtctttgctattctgaacagtgctgcaatgaacatgcaagtgcgtgtctttttggtagaatgacttgttttcttttgaatatatatccagtaatgggattgctgggtcaaatgatagttctaagttctttgaggaatctccaaactgctttccacaatggctggactaatttgtattcctaccaacagtgtatgagtgttcccttttctccacagcctcaccaacatctgttattttttgactttttagcaacagccattctgactggtatgagttggtatctcactgtggtttcaatttgcatttttctgacaatttgtgctgatgagcatttgtttcatatatttgttggctgcttgtatgtcttcttttaagaagtgtctgctcgtgtcttttgaccactttttaatggggttatttgttttttgtttattgatttaaattccgtatagattcttgatattagacctttgttggatgcataatttgtgaatattttctcctattttgtggattatctgtttaattccttgataatttctgttgctgtgaggacgttcttttgtttagttaggtcccaattatcaatttttgtttttgttgtgatcacttttgaggacttagccataaattatttcccaaggctaatattgagaagggtatttcctagattttcctctagggttttttatagttttaggtcttacatttaaatctttaatttatcttgagttaatttttctatgtggtgataagtagaggtccagttttattcttctgtatatggctagccagttatcccagcacaatttactgaataaagagtcatttccccattgcttatttttgtccagttcattgaagatcttgtggttgtaagtgtgcagctttatttctgggttctctgttctgtttcattggtctatgtgtctgtttttataccagtaccatgttgttttggttactatagctgtgttagtccattttcatgctgctttaagttacccaagactgggtaatttacaaacaaaggaggcttaattgactcaccgttctacatggctggagaggcctcaggaaacttatggcggaaggtgaaggagaggcaaataccttcttcacaaggtgtcaggaaggagaggagagagtgtgtgaagaaggaactgtcaaacacttgtaaaaccatcagatctaatgagaactcactcactgtcatgagaatagcatgggggaaccacccagatgatccagtcacctcccatcaggtctctcccttgacacatgggaattgggattacaatttgatgtgagattttggtggggacacagccaaaccgtattagtagccttatagtatagtttgaagtcaggtaatgtgatgcctctggctttgttctttttgcttagaattcctttggctattcgggctcctttttggtttcatataaattttagaatggctttttctaattcagtgaaaaataatgttggtagtttgatacaaatagcattaaaactgtaaattgctttaggcagtatggccattttaataatactgatttttccaatccatgagcatggagcatttttccatttatttgtgtcatctctgattttttttttcagcagtgttttgtagttccccttaaagagatgtttcacctcctcggttagttgtatttctaggtatttcatattttggtggctattgtgaatggaattgtgttcttgatttggcactcacctagaatgttattggtgtatagaaatgctactgatttttattacatgtattttgtatcctgaaactttactgaagtcacttattagttctacgggccttttggcagaatctttagggttttctaggtatacaatcatattgtcagtgaagagagttcaacatcttcttttcctatttagatgccttttatttctttcttccgcttgattgctctggctaggacttccagtactatgttgaataggtatggtgagagtgggcatccttgacttgttccagtcctcaaaggaaatagtttcagcttttgctcattcagtatgatgttgactgtgggtttttcatagatggctcttattattttgaggtatgtttctatgatgcctagtttgttgagggtttttgttgtgaagggatattggcttttattgaaagctttttctgcatctattgagataatcatatagtttttgtctttaattctgtttatgtagtgaatcacatttattgatttgtgtatgttgaacccatcttgtatcccaagaagaaagcatacttgatgatggtgaattaactttctgatgtgttgctggattcagtttgctagtattttgttgaggatttttgtgtctatgttcatcagggatattcacctgaggttttcttttttcattgtgtctcttccagattttgttatcaggattatgctggctttgtagaatgagctatggaggagtctttcctttttgattttttggaatagtttcagtaggcttggtaccagttttctttgtacatctggtagaatttgtaaatccgtctggtccagggctatttttggttgggagactttttatttctgattcagttttggaactcattattggtctgttcaggttttcactttcttcctggttcaatcttgggaggttgtatgtttccagggatttattcatttcctccagattttctaatttgtgtgcataaatgtgttcataatagtctctgaggttcttttgtatttctgtggagttggttgtaatgtcacctttgtcatttctgaatgtgcttgtttggatcttctctctcttttccttttttaatctatctatctatccattttgcttattctttcaaagagtcaagttttggtttcattgatcttttatatggacttttgggtctcttagttctgctgtgactttgcttatttcttatctttggctggttttgaggatgatttgatcttatttttctagttcccctagatatgacgttaggttgttaatttgacatttttctgacttgttgatgtaggcattagcactataaacttttaacactgttttagctgtatcccaaagattctggtatgtcatgtctctgttttcattagttttaaataatttttacttttctgacttaatttcatcctttacccaaaagtcattcaggagcaagttgtctaatttccatgtaattgtatggttttgagagatcttcttggtattgatttgtatttttattgcattgtggtctgagaatggttggtatggttttgatttattttgagttcattgagacttgctttatggccaagcatatggttgatcttagaacacgttccatgtgcagatgagaaaaatgtgtcttctatggttgttgggtggagtattctgtaggtgtttattaggtccaattgatcaaatattcagtttaagtccagaatttcttctagtttcctgccttgatgatctgtctaatgttgtttgtggagtgttgaagcacgccccccacccccactattattgtgcagctatctgaatttttttataagtcaagatgaacttgttttatatgggtgatccaatgttgagcgagtatatatttagaatagtgatgtcttcttgctgaattgaaccctttgttattatgtaatgcccttctttgttcttcttgagtgttgttggtttaaagtctgtttcttttttttttttttttgagatggagttttgctcttgttgcctaggcctggagtgcaatggcatgatctcagctcactgcagcctccgcctcctgggtttaagtgattctcttgcctcagccttccaagtagctgggattacaggtgtccaccaccacacctggctaaatttttgtatttttattagagatggggtttcaccatgttggccaggctggtctcgaactcctgacctcaggtgatccatacatcttggcttcccaaagtgctgggactacaggcgtgaggcaccgcaactggcctaaagtctgttttatctttgataagaatagtgaatcctgctctttttgatttctatttacatgataaatctttctccacccttttactttgagcctgtggatgttgttatgtgtgaggtgggtctcttgaagacagcagacagttggttcttgtctttttatccaatttgccactttctgccttttaagtggggctgtttagatggtttatattcaaggttagtattgatatgtgagattttgatcctgtcatcatgttattggctggttgttttgtagacttaattgtgtagttgccttatagtgtctgtggaatatgtgcctaaatgtgtttctgggtagcaggtatcattctttcattttcatgtttactactcccttaaaaatctcttgtcaggctggtctagtagtaacgaattcccttaataatgttccttgttcgaaaagggtttggcagaatataaaatttttggtgggaatttcttttaaggatgctgaaaatagtctcaccaatctcttctggttcgtaaggtttctgcttagatgtctgctgctagcatgatggggttccttttttaagtaatttgatacttctctttatctgcctttaggatttttttttttttttgcattttccttggtgaatctgatgactatgtgtcttggggatggtcatattgcatggtatctcacagggattctctgttatttattgaatttgcacatcaacctgtctagtgagattgtggaaatctttgtgaactatatcctcaaatatgttttccaagttgcttactctttgtacttctctctcaagaatgtcagtgtgttgtaggtttggtctcttcacataatcccatatttgtcaaaagttttgtcatttttaacaattctttttcgtttatttttgtctgagttgatttgaatagctggtctttgagctctgagattctttccttgtctttgtctattctgctgttaatgctttcaactgtattacaaaattcttgtagtgaatttttcaattccagaagttcagtttggttttatcttaaaattgctatttagtctttcagctttttgaccattttgctggattccctgggttccttggattgggtttcaactttctcctgactcttgatgagtttccttgccatccagattttgaattctatttctgtcatttcagtcatttcaatctggttaagagccattgttggggaattagtgtgcttgtttggaggtaaggggacactctgacttttttaattgtcagagttcttgcattgattcttagaaggctggtgttcctttttctttttggatttgctgttgttggatagggcattttgtttattttttttattgcctttgaggtttaactgtggtgtaaattgagtatagtcaattggcttaatttctgggtgctttcagagggccaaggctctgtacaggacttttatttgtggctggattcttgtcctaggtttcacagctgatgtatactggcagaatatttttcgtgttgtaatttgggctgtgatccagtagatggtgcttaagagtaatggctggcagataggttgttactcagtggtagggctactttgtatttatgtgtgttcacaacagtgctctgtggtgagtggtgggaagagatgactcccttgccaggttcactcctgggccttagcggagccctctctgatcactggtatagtgcatgcatttcctctgttacatgttcctggctgtgagcctcccttgggcagaggtcatggctggtagataggctacacccctccccaactggccttgtggagagaggcgtgctccactcccatgctggaccataaacctgcatctcacttgtctcacagatctcaactcagcactcctgagctgtgtgttgcaaccctggggtgctgggactgggcccgcagctctatcctccagccccttggggtctggcattggctgctctgggggatcaaaagtgctcccaggccactgtaaaagcactcaggtggggccactggcaaagcactcagcttaggcagtggaggctgtgctatgcacatgctcctgtgggagcagccaggcaggggccttggaaggggctggcaggcaggaggcctgcataatagatgctcccctgtcctgtgggaaagatggtattgctgtctcctggaccagtggtcagctggagttagagctactcagaagaagatggccctaggggatggacatctatggccatattccactgcagcttccctgtatgcataccccgcctctggcttaatgttggagctctgtctctgcctactctctggtaagatccctttgccaattcaaatgtctgtggaggttgtggggtctcttgtatgtaggttcccagaggtccacagcaagagtgggctgccctgccatcacttcactcactccttccctaggagctgttcagggccaggaactagctgtcatgctcagcaaccttttgcagggttctcagcttccttcctcttcagccttggtgtctgcattgtctgtctatcaactctcagtgttttttctctgaagatgtgtttgaagtatgttggtttactccatattttcgtctctcttggtgggagtggcacttcttggctgcgtctagccatcttgtcctgcatccttaaaaattacttacatatttttatttagagtcttccagtgaagttgaccctccagaaagatggaccaaggatattctgctctttgcatcctccctgcacagaattgagtctgtgcctactcccgtttcagaagcatgtattagtggagtactgagttaatctggaaaacttgctggtctgtgagaaatcaaacttcaggcagacaagtcaggaagccaacatcttgtggggatgtggtgtcactgttacaggggagaacagccaccctgaccatcctggctccccacaggcaggagagatttaggaacccgttgggtggctttttaaaccatggttattatcaggactttggtaggggcagtccctgacttacatcattcaccgtatttgaggatggtgaggtggtattaaaatagagagtagtttcagttcatggcatcattctaaaacacttactgatctacagagtttgactcagagatacctggtcaggtgtattgaggtgtcctctcaggaaaatgatgagcacatcaatatatccctgtaaataaatacccagggtctttgtttacccagccctccccacatagctcttgtttggagatgtgcaactgaaaatatgggatggattttactatagaaatgatgtctaaaatggaagttacgtgttggtaaaagataatgcttcaggctcaacttccagtaaagtggatctgccactgaagaggcttttgtagaatagcctggagaccactttgtttctcactttcagtattcaatcaattacattagatattcaacattttattataaaataggctttttgttagatgattttgcccaactttaggctaatttaagtgttccgggcacatttaaggtaggctaggttaagctatgatgttcggtgggttaggtgtattagatgcatttttgacttacaatatattcaacttataacgagtttattgggagaaagcttcattgtaagttgaggagcacctatatgtacgtgtgtgtgtgtgtgtgcatgtgtgtatgtgtgtatttaaatttatcttatgtggtattctctgagcttcttagatctgtggtttggtgtctgacattcattttggatagttcttagccattattaatttaaatttcttctgctctattctttagtttccttttggtattccaattgcgtacatctaatacttttgaaattgtctcgtagtccttggatgccttatatttttattaatttatttttaagccaggtgcattggcacatgcctgtaataccatcactttgggaggctgagccgggcagatcacttcaggtcacgagtttgagaccagactggccaatatggtgaaaccccaactctactaaaaatgcaaaaattagctgggcatggtagtacacacctatagtcccagctatttgggaggctgaggcaggagaattacttgaaccctggaggtggagctggcagtgagctgagattcacatcactcctctctagcctgggtgacaaagcaagactccgtctcaaaaagaaatatattattttttcttttttctctttgcatttcagcttgagaaatttatattgacttgtcttcaagttcactaattttttctttggctctgtgagcctactgatggtattatcaaaggcatccttcattttgatcactgtgttttttatatttagcacttccttttgactttttcttaagagtttcgatctttctgcttacattatccatcttgcatgttgtttgctttttccattagagtccttaacatagtaatcatagttatttaaaattctttatctgataatcccaacatctgtgtttcatctgagtgtcattctcatgatggctttgtctctttagacaaagagtttttcccttgtgtttcttttgtgtttttccttgcctttgcatgcattgtaattttttttgttgttgaaagctggatatgttgcatttggtaataagaactgaagtaaatcgtctttggtgtgagattttatgtcaatctggataggagttggactgtgcttaatgtttgttgtaactataggtacaagaggcttcatgttcttctggtgtctgtttttgtctctcctcttggctttggagcttctctgtttattcagagagagtctgtgtcttaaactcttttctctgtcatctactctttttatactggaagcttgtggtggtaggttgtggggaggtaaagttttctatagtgttgtgggtaagtctctttcagcgggtctgtgtctttgggctgtgacctttgcaggtgtttccgtctccccctgtggtattgttcctccacctgcctaccccatggctgcagcattaccgttcctggagccctgaccccttttggacatgtttttttttttcccccttaggtgatacaggagccagaaggccagagtgggaggaattttcttctctcatctgggatgaggctctggcaaagtcctttgttcctggagagtaggtgcttgttatgcagaaggctctgagtatatttctccatcactcagagccatcactcagggtctctttcccccacccctaaccaggaccacaaaaagatcttcctcaggttctcaaaaggagaacatggtagggttcctggagggcaagttcatgaaagtgtgaggcctatcatgggtgcagccccagaagtttctctccccttgtgctagtctacactgtcttcagcaattcatccaaattaccatttaaatgttccccttagtttctgcctccagcgacttctgcttcaggtaaatagatcttagtttctaagattttagtttcagagatctgtatttctctggatacatcagtctcttcatattttgaggttttctctgtgacctgtattctgatgggtccaagaaaagccttgatttgtactttgtccagctttgacttataaaggaggaaatgatgtattctaaactctttacacatcagggctgaaactggagccacatttaggtttgtgaagcacatcagggtagatgtttatgtcctagaatgagggtggtctagtggatcgcatgggcatgacgttagaagatttagatctggcttgagggaactgtcactgactcaggagacatccttatttgttagatgggagttgctgaatccaacacagagtgtcacgaaagaacaaatgtgacaatgagaagtgttacaaggtctttctgtcagtgttaagacagctacacttcacttccctggaaccaatgcctctggtgtggcagaaagaaggcttcagctttctgtggcattggctttcttggctatccttcctgtcttttttgacttgctcccttatcatgtagtcagctctacatttattaaaaaagcagtagcctggtgccaggattctttcaggctgcctctctctttctctctctctctttctcctttctttctttctttctttctttctttctttctttctttctttctttctttctttctttctttctttctttttctttctttcctctctttctctctttttctttctcttacacacacacacacacacacacacacacacacacacacacttcagcgttggactctggccatcagaaacatgcattctgtcagtttaaaagggagttgacaggaatcattgtgaaaacacacttgttctggaatctgggctcatggaatttgctcctgctggacattccctggacccggagtgatgccaaagtaaggcaaggccacaagcagccccactttgcctgacctttcctcactccatgcctgtggggcttggagagcagctgcggaggattgggtgacttccaaagtcagctcttgagagcaggttgccagggaattctcttgaacagggccgtccaagggatggacacatttcctggtcctgaagcagagaaattagaagcaaaaataggcatggaaagatgctctgcccaaaagaagtcccccctctcttccccaggagttgaataacagttctctttcatttgggtatattttacttttaaaagcttaatttagtcatttttaacaacaaagtagaatagttcagagatttataaaaacagcagcaataacaacaaaaaactttgctgcagtgtttgcttttcctgcaggccctcctggtgaggctgctctttgaagcacttacacaggttctcacaactctgcttgggccaccttcccaaaagcaatggccttttatgcccccaggtgacccatcgcccccaccttcttcattctcctgatctatgtcattgtcccacttacttctcctcaaggcaggaaaagggctgtgggatgagctcattgatatcattcaggtgagcagcagactcctttgtgtccaggtgagaacatgggatggctccttcacgtggtttgggaataagtgtagactccttttccacttttagggaacccttgctcagtttcctgggaagagttgggataagaacagatcctagggatgctgatagaatccatctgcagttggggtcttaccagctcagggcttgtcccagataaagcctccggggaaggaagtgtggttcttttgctccctctgctttaaagcacatgtcctgaaaattcccattggcatcttcttccttttcagtccctttgcctctcgtggacatgagttgcctgtgtgtatttgtttatgtgattatttgtttagggcttagggtttgccattcttttgtgctaggctctaacaggggtcttgatcactaatcattactgtgtctttggggtctagtatactccccaacacatagtaaattcctgaatacctcagtggcattgttttaatttaatcctcacataatttaatagagcctaggaatagctctaccactattcccattttagggatgaagaaattaagactttgaacaactcactcaagtcccccaaatgaaatctagatctgagagtttgattcttaagcccatgttctcaatggacaccgaaaaatcctcctactaggcaagggagtgagagagaaaatgaacacaatatatgatcatatgagaactcaacgggaacagaaagacaaaatatacctgaaggaccaggaaaaaggagggcttacaaatgtatttcaggcaagaactttctggaagaccctttcaagtggcaagcacctactctgaaccgcttttggtcagactgctcacgttaatattcattttggtgaatcagagttagaaacttttgtcttttggcaatcattggaattttgaaaaaaaagttctataagtggatctaaagatttgatagtttatttcaatgaaatttttttttggctaaaaatgtgggttaacggtctatttcaaatgtatttgacattgcagcctttaagtgatactttaccagctagaattcaatttgcttacttaggggaagggtaggcactatcattttttgagcatgcattgtatgccaggcccttcacattgaaccatgttaggacatctttgaagacagactgtatctcctcccttgcttgactgtctcctacagtgctcaataagtggctggggttgagaggtccaggaaaaattctgacttctacctttggtaatcccaggcaaatcttgtgatctttgcagggcaccattttcttctgaaatgaaggaaggtgggggaggtaaggtagatggatctttaaggattcttctgggttaaaagttcagaaagtctgtgattccagatgggtgttctcgtccttctttcacagtcctttctctttaggaatcatggaagggccagagaggcaaaagcactgttcagctaacacctgcacagcttggctgacaggtgggccctgagaatgaacagcgtctgtgtgtgctggccaagtgctgagcctgcagcctgcagctggccttcttggcttctgtcgaccccttggctgcctgagtctccggcaactgttcaatcatttgttttttcccctccgaagagacagtcaagggtgctggggggcttgttgctttgggaattctgccacatttacaaatgccttgtaacccttattgagtgacagatttatttgacaatttttgataagtgggttgtttgcgacttgctgacggagggaattatttgtaattccaacttgaaaggctggccatctgaaagccatgactaagcgagcacatgtattaaaaggtcattcatagttgcttaacatcttggcatatatcatcttctgatctctgtttttattgttttgatctcaaaaagaaactttaaaaaatgtgagatgtggaaattgggaagtgacagaactatttatggtccccataagcagctgacctacttcagtgacaaatgttataaacatgtcgtgttaaaagcccaatcttttgctctcaattctaattacttggaattcactgaacttgagggaccctggattttgtttcctgctgggatttggtaatggcgacattctgacttggcagagtgagagccactctgctgagtcacagtcctcttaacttcatccaggtctctacaaatctaagaactagaatttggtcactttgcaggtgtctggaactgttcccagtgcctattgctgagttaggagactgaccataaactttttgctttaaagaaatgcaaagcatgttcttgtctcccaccagggtgctgcttctgaaaattgaagtgttttgtgtcctgtactgttaaaggttggttctgaggctagttgatcagctgagctctaagcagtttatatggatttttctcatttaatccccaacataccctttggagataattgctgttactggtcccattttcaggtgaaggctggttagctaacttggcttaagtcattcagcaagtaaacaatggagccaagatgtaaagtctgggaggtctgatgccaggacttgtattattatccatgattcattcaagttaaaatgactctagttcttggccacttataccaggaagccacctgggagatgtgtacaactggtcatggttagggaagagggaacatgtggtaaagaccatcagatggaagaagggagcgacccagagcagcttcttccaagttactggaaaaccaaccaacctacctaccaacctaaaaaatcagggtgaactcatcaagatgtagcataatttttgtagaaaaagtacattactttggggttcaaagacccccaaataatatgaatatcttgttcctaaaaaaaaatggacagaaggaaagaataagatttcagaggtggaagccaggctacagactaagaacaaagttgtgggctaggctcatgcctgtaatcacaggactttgggaggcaaaggtgggcagatcacttgaggtcaggagttcaagacgagcctggccagtgtggtgaaaccccatttctactaaaaatataaaaattatccaggcatggtggcaggtgcatggaatcccagctactaaggatgctggaacccggatgctggaacccgggagggggaggctgcagtgagccgagattgtgccactgcactccagcctgggtgacagagtaagactctgtctcaaaaaaaaaaaaaaaaaaaaaagaacaaagctgtgaggggccattgacgtcaatggctgattcttctcccctgaaagacagaaacttctattgaaatatattttcaaaggcctcagtcaaacagtgcctgagaagagaaaaatggaaaagtaatgatgacaaatcaattagcacatcaattcatgggtttaccaaagacagctaaagaataatgtcacgtgtgtaaacttgctttttttttttgagatggagtctcacgctgtcgcccgggctggagtgcagtggtgctatcttggctcactgcaagttccgcctcctgggttcacgccattctcctgcctcagcctcccaagtagctgggactacaggtgcccaccaccacacccggctaatttttttttgtatttttagtagagacagggtttcaccttgttagccaggatggtcttgatctcctgatcttgtgatccacctgccttgtgtcatcaaaaggaataatgctttttgtaattaaaccaggtttgtttgttgtcacagaaaaaagagaagaattctgcaatttcttttgttattttcactcaatgatgtcttggatatttgttcaggttagcacatatagatgtacctggttccttttaactgctttttaatgttctacaatgtggatatgtagttattttgttacctctttaccacttgaccactggggttgtttacttctttgctggtacaaccaatgttgcaaagaacgttcttttttttttcttttttttttttttcattttactaagttctgggatacatgtgcagaacgtgcaggttcgtcacattggtatacatgtgccatggttgtttgctgcacccatcaacccatcatccaggtttcaagccctgtatgcattaggtatttgtcctaatgctctccctcctcttgtccccaaccccctgacaggccccagtgtgtgacattcccctccctgtgttcatgtgttctcattggcaaagaacattcttagtgcatgcgtccaggggtggccgttgcccttggagagaccctgctgtgggaacagagctgattgatgttccagctgccacacctctggatccattacagccaggccacatttctaccatgttgctcccagtgagtgacagcatggcagcagtactgtaactgggactgatgtgtggttccagggcaactttggctgaactactccccatcaacttggcttaaattttctcagaattgttctctgctctgaagcacatcctacttaatttttccttctctctctcatagatatcagatctttatcatagcctgaagggtcttcctgctttcttctgctccttttccctttattcttcatagacatttctcccaataaatcatttgcatgtccagtcttatcttggcacctacttctcagaggacttgcactgagctacccccgaacatgttggtcagcatttctctagaatgaaacttggagaaataaagttttggggccttaaagtatataagcatatctgtccacatatttccttaactttacatatatatatatatataaaaaaaaatatatatataaataaatatatgaagtgcacatatcattaataagcagctcaacaaatttcacaaactgaacatatccatgaagccagcacccagattatgaaacagaacattatcagcctttcagaatcagaaacctccttataccgccttctgattcaggacacgcaggcctccaaactggggcttagcctgggagggttcttggctttgcccaggaaaatattcaaaggtgagccagtggtgttaggcaggaatcttttattgaatggcactgctccttgtggagcacagataactcataggcaatgcacccagagtcagcaaggtatgggctcttgacaactgcatttatacccacttttaattatatgcaaattaaggagtagtttaatgcaaattgaaaatatgggtagaactttcttggaaaggggcagtaacttccagattgttgccatggaaagatgtaactcccaggttgttgccatggcatttgtaaagtgtcatggtgctggtgggagtgtcccatgctaatgaacaatgagggaagctggggattactgtcattgccatctgctgattttggccagtttcttcacattatcctgtctggaccagatcctcctttggtcaacagggttgtgactagaaaacaagtctcctacctcacttccagtcatttcccacctccccaaggctacatctgactcttaacaccatagattagttttgtctgttcttgagtaagttatacaatcatacaatgtgttttaaaataatacaagatgtattctttagtgctggcttcttttgcttaacattatgcttgtgagattaattcatgttcatttattatcatcgcttgtaatattctgttgtgtgatgtgactaaacaacagtttattcattcattttttactgttgtaatttccagtttttggcttctaaaaacagtgctgaaatgaacaatcttgtacaagtcttggtgaacatacgcatacatttctgttggatgtgtgcttagaagtggaattgcaggatgtgctttaaatctagctgggtatagtggcaaatgcctgtaatcctagctgcctgggaggctgaggtgggaggatcgcttgagcccaggagttcaaggctgcagtgagctatgatcataccactgcaattcagcctgtgtgacagaggaagacactatctcttaaaaaatcaaagcctttcttgcccaaaagtttagtgttaaatacctgaaaacaaacccaaactactgtatcaatcagggtccaaccaagagatagaaagcacacagtaatttgaacctggaaagttttgtatgaaaaattattagctataacagagggttgatgtaatgaggattgtctagtaaaaagtaaagagaactgtaaagaatggaagaagcagatatgagaagtagcttctacccatagatagcactcccaagaatgttccttcctcccctcagggaggatccaaccttattgggcagacaaggccatggctttctgcatggtgagtaagttggctgagatgtcatgacagtggaatttactggaaatcatccctctgagatgctgggtgtccacagagaggtccctggtagtgttgagtgaactgccagccactgggtgctgctattgctacatgctgaagaaatcattcacttcagaagccagacactggagcagcctcacaccatagaagctgggtagggggagaacataagacctgaaagaaaaaaaccccttcctcttatgtccccttctttcccattccctctactgacaagacttaatatcatgccagctggtaaaggagaaatattttcagggtctagctcaatttttgcagagcaggcaatgaaagatgaatttagagctgagagacctcaaactgttaattggcacactattatctatgataaacagatatacaatagaaatagtgaaataccaattctgttaaatattgtccattgtcaataaatatgctacagtgtgttttgaggaatagctttctagaaagaattgatgttattgtatgtggtccgggcgtgggatttgggatgctggacaaatggttattatgacttacttccaaaggccctctttgcttatttgcttcaccagctttgaatttcttggcaaatcctaatggaaactcacctatgtaatgggcttgaatttgactacacaaactcagatgtgcaagacatgcatgtcatgttatttttcaagaataaatttaaatctgtatctgagtcctaatctttctgagctgctgggatagtacatctcattcattgttggagtttcctgtctgcccccatcccaagtcaggtataagcctcagagcagacatttgcagagaatcccatggtatccattaacaagctcatggtttaagtgcacattatcttttaagagtggacatccggccgggcgcggtggctcacgcctgtaatcccagcactttgggaggccgaggcgggcggatcacgaggtcaggagatcgagaccatcccggctaaaacggtgaaaccccgtctctactgaaaatacaaaaaattagccgggcgtagtggcgggcgcctgtagtcccagctacttgggaggctgaggcaggagaatggcgtgaacccgggaggcggagcttgcagtgagccgagatcccgccactgcactccagcctgggcgacagagcgagactccgtctcaaaaaaaaaaaaaaaaaaaaaaaaaaaaaaaaaaaaaaagagtggacatcctttctgtggaaatgagaatctttgtggaaccctggtgctttggtccagttgtactgggggcatcaagtagtcacttctcctgagatcctgcctctagcttgaggtgtggcaaagaaacaccaactaatttctcattccaaagcttggacaacctcactccttttctctctgcttctgctatactgtatcaaaggcacctgtttctcccccatttctccagtaacctcaggcttttaaaaacagagggcaaacagggagatgttcttatatacctttttgtgttgcgtccagaaaatacatcctatctgattcttctataaagaaaacacagtatctaaatacgttttcctagcacagttatttctatgtttagttcctcttacaggatagcagatgtgatatgtgtaaccccttacttctttaagcttcagcaacatatcaaaaaagatgaagaggtatgaagagccattataccaggcagggttcttagttgctatatcagttagtttagttgctaggtaacaaattactctaaaacttagtggctttgcataacaatcatttattattcttaaaaaatgtatcgactagctgagagattattctagtttagctgaaatcactcccatgcctgaagtcagttatgtttctgatggccatctcttctgatttgggctggactttctttacgtgtttggagtcaactagctgtaggctggtgtaggttgatcttggttgagccaacaggctatcttgcatatggtctctcatccccaagcaggataactttggctagttctcatggtaggagcagggacccaagaacgagagaagtatgaaagcctcttgaggcctaggcttggagcaagcacaccactactttcaccacattctactggacaaagcaagtcacagggtgagggaaaacagactccctctcttgacgggaagagcttcaaaatcatattgcaaagggtatggatttaagaattaattggggccaccagtgcaatcaatgtaccacagctgccagcaacagaattcactctgcctagttcaagcagaaaagggtgtttgcctccatatttccttttctttttcttttctttttttttgagacagagtctcactctgttgcccaggctggagtgcagtgatgcaatcttggctgactgcaacctctgcctcccaggttcaagtgattctcctgcctcagcctcctgagtagctgggattacaggcgcctgccattgtgcctggccaattttgtatttttagtagagatggggtttcactatgttggccaggcttgtctccatatttctaaatatcaaggatatacagctccatcttgatttgtttttttagttgtaggtattatctgctcattttctactgtggaatatgatgatttaagctgtcaaagtctctctcacatgcactcttttatacacatgcacatgtgtgcacacaaacattttcctctcttcttcaaatacatataatttttggttagctcaatagtatttatattattgatacccaagtgttatgggttgaattgtgtctctctaaaactcagatgttgaattcctaaccctcagtactcacaatgtaaccttctttggaaatagtcttaacagaggcaatgaggttaaaatgaggtcatttgggtggaccccaatccaatatgaccagtgtccttatggaaattagacattttacgaaatttagagacaggcatgcacacagggtgaatgtcacatgaagactaaggcagagattggagtgatgcttctacaagccaaggaataccaaggattgccagcgaacatcagaagccaggagagaggaatggaacagattctctctcatagtcctcagaagggaccagccctgctgacactttaatattagacttttagcctccaggaatgtgagacaagatatttttgttgtttaagctactcaatttatggtactttgttatggcagtcctagcaaactaatacatagagtcatatagtatatgctattattatgcttcctttcttaaactgcttttttttttgtttttctggatattaatcattctttctctctctgtctcttcccttacttttctatagatctattaccaatgcaccccaaactcccaccttaagtgtatatctcttttcaatttattagaaaaagattagatcaccattcaatgtcctcttcttcccttggatctgtcccttctggggttctttatctttgtgctccaccttgaaccttattgatttctagaactgtcactcggctgatgttctggaatctccccttttaaactcatcttggggatcccctttccctgtctcttgtgttggctcccatgttttcataattccatgtgtttgtttctaagaaaaaatagagcaagggaggtaaattctttgaaacgttgaatatttgaaattgtctttaactatacatttgattgatagttgttttttgtgcataataaattaccccccaaacttgaagtagctaaaaataacaagcatttattattttctagtttctgtgatcaggaatctggctgtgttctctggctgagagtgtcacacaggctgcgatcagagacagcaagggctgcagtcatctcaatactggattgagggaggatctgcttccatgctcactcgtggcagttttcaggattcctttcttcataggtggttggtatgagggccttagtttctcactggctgttagttggaggtctctctccgttccttgccacatgggctctccatagggcagtgaacaacatggcagctggcttccttcggagtgagcaagtgagagagagaggaccagcaagaggaaaccagagcctttttgtagcctaatctcagaagttacagtccaacacttttgctgtccccaattcattagtgagtcactagatgtcacaataagcctgggctgccataccaaaacaccacatactgggaggcttaaataacagattgtatttactcaaagttctggaggctggaagtccgagatccgggtgccagcatggttgggctctggtctgggctctcttcctggcttgcagacagctgccttcttgggagacaattctctagtgtcttttattatagggacttaatcctatcatatcagggtctcttatgacttcatttaaatgtaattacttttttcttttttctttttttttggagactgagtcttgccctatctcccaggctggagtgcaatggtgtgatcttggctcactgcaacctccgcctcccaggctcaagcaactctcttgcctcagcctcccgggtagctaggtctacaggcgtgcacgatcacacacagctattttttgtattttttagtagagatggggttttgctgtgttggccaggctggtcttgaacttgtgacctcaggtcatccaccagcctcggcctcccaaagtgctgggattataggcatgaaccatggtgcctggcctaagcttaatacttcttaatccaaatatagccacactagggggttagagctttaacatgtgagtttgtggggacacatttcagtccatagcactagggtcctgcctatatttcaagggaaagagattatacatggtcatgaataccaggaggcaaagaataacgaaggccgttttagaggatgcccactgcaaccggagtataaaattctagatagaaaagcactgttttttagagttcattgttgctattgataaatctaatgccatgctgtctttaatctttcaatatgaccaactctttttctcttttggaaatttctttgtccacaaagttctgaaaatttgtggtgctgcaccttggtgtgagtctattttcttccattttgcttgatgctcaggggaccttttccatgtggaaacccatatctctctgttctgggaaatttcctgaataatcaggaaatatttgattattttttttcccctgagcagataaattttcttattttttatctacatttttctgtctttttgtttggttttctgggaaatttcctcatctttatttttcaaatactttatggatttttaaaatttctgcttagttttaattctaagatatcctttattttactcccaagtgtttcttcttatagattcctgtctattatggatgctataataccttcccttatttatgagaattttcaagacagttcatagaaaaacattttttttcctgaaccccatcctactttgtccatgtttcctctggtgttctcttattctgttagtttattttaatctcattttcatggtggaagtttccctcaaaggtgactcttggttgtattgagagtgaggctaggcatggtaaggattgttgattggtggccttcactgtggggtgatctgattgggctattttactgaaaaatctctatatctcagtatctctaggtttgttttttctcattagttggtttattttctaaaaattgtgttgattttttaaatcaatacatttaaatctgctttctccagtaaataaatttcaattctcctgctgaagagggtatagacaggcctgcctgtatcctcgttgctgagaagggaaggggagccaggacttttactcttttctctgtggactttttgctcaacgactctgttttcaacatggcacctcacctttggctgtgcatgggctctaccaactttatgctctttagaaactgaacaactaattatctgctataatctcttctgttttctttgtccctttggatgtatgccttagaaatcctgttactactgttttagggaggttctggccagcagcctcaacatcagcctcactttcctgctagtagctactttgacctcatgcaaccagctcttctgtaggcccatctcggttttcagaagtcttaggctgggatttccattttgtgtcaattagagaaaccctttatgcttaagtttagccaaactgtacctcattatctctgcctcttgctaaaccaatgccaaaacaaggatgaaagtggtttgggcatcttcaggtagtgactagaactaaccctggggccaagtgaaacccaccacaatcaaccatttgctgaaacaagtagatgacaaatgttcttaggcagtgtgatctttaaatcataaactactcagaaacaactaagaatctcaggacacaaagttagtgttttccaaaattgtgtttatcttcagattcttttcctgtaagcaatggaactcatgttatgaatagctatgtcttatgccatggagccatttcactctctataacctgaaagcccttatacagcatctaaacatgtaagagtctgtggaacccaggtatgagatattaactgcctctcttctgagacttgctctggagcagtatgagaacaaaaagtccaaattttagcctctcagctgctcactgcctgctgtccctgtaaatatatgtgaaaatgtttgccagatcattatggtggctaatcaaataccaccctccctgtaatttaatgattttctgtatatatgtaatacttcttctacattgaaaaatgctttatttttgttaattttatgggtaatatatacttcttggaaacattaaaacaacatacaaaccacagttttctgaggcttactcacttccctgggatgataccctgggaaactttgtaaatgtacaaaggccaatcctcttctacttcaaccagccagggcttctgtgcactttatcagctctccagatgattctgatgtacatcactgtgtgggagccacagctttagctcactgacttgtattctggttctatttgcaagactctttctccagggaggacacagcaggctataagtacagttgattcttctaaccccctttatgctgatttcagccccagtaaatcatcttctgattatgattcagctcccacatatatccagacaggtaaagaatgcaatgatcctatggattcatgcctttcctttcccatgacaatgatttctcattgtcaactgagaagatgtccttgagcttgattaatgtgagtctatgccattggccattagaatgagaatcccattagaatccattagaatcacctgggaaagcttctaaacacccaaatggaaggccacccccagatcaattaaatgagaatctctgatgatgtgattcagatgccatactttttggagttccccaagtgattcccaggtgaatccattcccagtgtgctgacaaaacccggtactgagactgaaggggctgagggccaggcttcactttaggatactcacaaaggcaatccgtgtgtccctctgagacctttggatggacatccagctggccttttctggagaggaacaacatactacccaaataatcctattgaccagtccccagaaaggctctgtacaattttatgcaatgttaacccaaaccagctgtattggtcagggttctctagagggacagaactaatgaaatatatatatatgaaggggagtttattaagaattaactcgcacaatcacaaggtcccacaataggccatctataagctgagaagcaaggagcgtcagtctgagtcccaaaactgaagaacttggagtccaatatttgagggcaggaagcatccagcacgagagaaagatgtaggctgggaggcttggccagtctagtcttttcatgtttttctgcttgctttatattctagctatgctggcagctgattagatggtgcctacccagattaagggtggatctgcttttcccagcccactgactcaaatgttaatctcctttggcaacaccctcacagacacacccaggatcaatacttttcatccttcaatccaatcaagttgacactcagtgttaaccatcacaccagcttagctaaactaaaatttgaacaccttctctgtgagatttgcaagcaactctggggtttactttcccaaggaactgggctgagggggattggtgggtgggctagagtcagagcatcctcaggaggaaggttccgaaggataggagatgagagagatgggaaaaagggcacttgagttcttgcattacagaccctcttttttcctagaagggtactcctgaggcactattcccatcctaaagactagctgactattcttcagttatttgctccaatccaaattgcaaaggtgaaaatgagagttttaactgaacctcagaacttgtttccaagtaagaaattatccattccagccacttctgacacgtccatgtcagcacttcctgtggttcctgccccctactcttttggttagtgctatggctgctgggctgttggttttaacccttcatatgctactgatgtcaaagtctaataggagagaatttctcagtgtccttgcagaacagtaaaagatgaacagcttccccaaaggaggcttcctagaaacattaatttatgggacataaaacaaccaactagaatacagagacacagaaggaggatggagaagagagggagaacaagaaataaaggggctatctagattttaaaagtcaataattagtctgcttttagcattactaagatcagattgggccagaaggtgagcaatctcctgaaatataaggaaaaatatcaggatataatttctgtagatgaaattcaaccaagagactggacttagtgcttctgatcctaaacaaatcctgaaaaacagtctcaaaaggcaggattgatgggataaaattgagcacatatgaaatgttctgagtgctaggacctgaacacctttctgaagtttatcttttaagatttctttcttcttgtgccttactttgaaatgactctacctaaaatgagaacaatggcattctaagattactcctcagtgtttacaagccttttgacacattagggtttcagatttaggctctgtgggcctttttctcctttggtaaggaaatgtgaagtgtaggtgaacccatgaagcaagttcgtcctttgtgcttcatggaaaagtgttttccagcagagggcatccttatgcaacgaatttctctaccctcagaattatttgcggatattgaagtgcattagggaacagattttgcttttaaaggctttgcagttcagtttgtttttggcaagtcatttatacataaggtgctaaagtgttaagaggacttgttccaattttttttaaagttgggtaagtgataagttgtgctattaatgatgatggtagcagatcataaaatggtttaactaaatttctgctgttttatttactcataaattcaacaaatactgattgagtgccttctgtgtgcaagacacaggggtagaagtgggtatatgaaagtgagcctgaatcaaaccttcctggaaaaaagcttactatatataaaagggataggacacaaatgcaggaaaataaaatacaagacactctctctctctctctctctctctctctctctctctctctctatatatatatatatatatatatatatatatatatatatatatatatatatatagtgtgtgtgtgtgtgtattcttattagaagcactgacttctctaatattaattgttagtaggctttcacattttttccatttcctgctagagggcagctagaatattcaagttgttttcgaatgttttaacttctgccaaaattgatttgtttaggcttcctttcttcctattttcaaactccatctatattttaggaggaaattaatctgtacattgcaattctgcctgcaattttaaaaatagattatttggaaagacttgttcattgtctcggtattctctaaactctttccatttctagtgaaaaggaggaattattgtaacttggccctcttcaacccagaggaaatctggagtgaaatctgaaagcggcagacttgcttaaccttttcctatcagattgctggcagtggaaagtttgttaaaagtgtgtggattgagtgaaacaccatgggtctcagactgggccacaggttctgggagatgcatcttgacctcacttcagcctgacaccactggataaaagcaagcaacattccaagttcagttgcttttgtcccaaggatgagaccactcagacccacaaggctctgtcagaaccagcagtttcaggagcttgttagcttgactgtgtggcttgcagcaccttccagagaatgcagcagggcaggtatgaatatgtgatgcttttcatcttgggttccatgtccggtaaacgctctagaagctgtatctgaaactcaggctgcaccatgggagctaactgctggaccttagaacatagtagtagatttgggctccttcagaggaaacacagatattttgctcagtggcctgggttgaccacactttctgtaattgtcctgctacaggagagaccagaatggctcagtgtgccaagcatcttgaggagagtgccattctagaagccggttaagtttttcagtcctcaggtctattttcagtgagaaaatctatggcagatactgttagtgctccacccagatcccttctactggactggggcacacatcctcatatgtacaagttgatgcctagtgacacatagttgcttctttctccagagaattgtcccccattgaaggaagttacttcatcttttttttttgggcagaaaccaaaattggggcatccagcaattcagacaatgacagactgaaaatgggatacaaaatgttggtcctttgcccaaaggtagaaacaattttgtgatattacgcacactccaaggttccccatgaaatcaggctgaaagtaaagtccagctgagactacctcctacttgcgtaacacgattcctactccatcctgcttttcccactcccctttccctgagagcccacctgcaatagatcatgtctcagactgcttccagaaaccttacccgagacggcacctcttttcacttggtagtgcaaatagtcctcttttctttacataatgtgtttgttgcctatcagcagttgccacttcctctttttttaagagaacacactttattcatgtatcaggtggctatgggcttcagtccattctggtccccaagggtgaatcttgttaaattcaagccaatagtgatagttttattctcatttctagtgagtgatttaagaatagaatgtgacccaattcttgtcaatagcactgaaaagaagtcagctggagagcatctggacatgttttctttgatcttaaaaggggagcagagaaaaagatatgcttatattcctatctctggatattgccaagtgggaatgtgttagcagagcttcagcagccattttgtgactatgagggaaatccaggataatctcagactttgagggttatgatgtgattgagccttgaattaactgatcctgcagctgctccactttagttatgtaaaatagtgaaagttgtatttgtttaaacaaattagttgagtctgttgctatttgtaaatgacagtgtactagatatctgcaaagctagcctcaagaaaagttactttctaaaggccaagtgatattgagaatatagaacagaaaaaaacaatttatgttctccattctattttcctatcataaagagaagaatgggctggtaagaatttgtatgacattttgttttggcttatatagctggtttattgaatgggcttaacttgatggaagcaaaacaggaaataggcttattttctatccattactgacctcaaaattctctgttgcatttgccttgcctctccttctcctaatgacagctttttgttcacttttagctgtaagaacaatctcatttttgtattataaaatgtagtctcagctacaccaatacgttcaatcttgcattcagttaaaaatgttatttttccatagctcaggcctcaagactcatggctcagggtctggaaaaggggaaggaatggtggttgattcttttaatatcccattccttatcccatttcctgattttttttttttttttttttaagtgggtgttcagtgtagttctcttacccgttggccaccattttcactgtgatggctggtgcccaaatgctgactcttctgtgggacacatttatgggttcgttgggtaccttcccttgggaactcctgtggtttgcatacgtgaggctagtgattcaccctctgcttgatcttctggaaccccctccttagctccactgggaggcacgtggatggctaaaattccccgtctcctttgagttagtcgtggcaatgtgactttctgaaatatgaataataaacatacatttcacttctggatggaagtatttaattgccagcacttcactccccagcccatctttttccttaatggcaaactgcaaagacttgctttcgaaatattggagttgtaagaaaacagtccctgagtgacatggcgcagagccttccacaaacctaccttagacgtgctgtctaagcaaaaccccaaatctttattttaagccactgagattttgaggctgtttgttactatagatttaccttgcccatcttgactgatacggttctttgctttgggatttacactgaaattttgagacatgagaaaaagtctcattgagcatgctgtcactcctataactgaaggattttttttttttttggaatatttttatatacttcctgagagtacctatgtcttaatctcataatgctaaaataactttaataagctaattacttttagctgttctacaaagaaatcccatgagaaaacctctgagcatttatttcatgggggaagaccatcatttagaaatctggtctcatgtggtctacctgttcagctttgactgcccctctctccagcctataacctccagaccgagaaaatctcagcatccacttgttcatttttgcctctggaaatttatcctaacatttatcttcctttcttggagttttctctttctttttggtctcacctcttccatgaatttaagtcgactaaccaaatggtgatatttattcagcattgtcttagactgaattcctctagacagactccaaaacaaggattccagagcaggtatttatttgagaggtgattttgggaaatgccaacaaaaatgtagagagtaagaatgagctgggaagagggccaatacagggttcattaatgagctcaagacaactaggactcaaatctggtggggacctctcagagactgtgtagaacatgcacctcagggttgttctgtcaaagagacaagggagcttcgggtattaatccaccagtccatgactataattggctgagggatgttcccaggggcatttattccatagttcttttttttttttctgcccaggcaagcacaatctagtcacaagacaaagcccccgaggcaggtccacaggcacttatagtagaaagtctggatctgaaggagaatggtgagttcagagaacccagcagcatctactaccagccatgtcttgagttcagagtgctggttctttgcctcaagtacttaagattgaggcaggcaggcaggcacctgtttaccataccataaggcaggatattatatgttaacagaatgactaaaaataaacaacataataagcatgaaggaaggagaaattaattttactttgagaaagcagagaagatggattttcatttggctttaaagggtggaaaggattcagtaagaggagtttctttcaagtcagggactaatgttagcacaggcttggctgctgtagcatcagtttatgttttgggaaaatcgtaagcagtgggtttgactggacaaaaagtggttaagatggaataggaaattgaggtggaaggaatgtagggccagatgatgaagggccaagagttccatttgtgatttttttttgatagaaagtacaacatttgtaaaacttgcagggagatttaaactcttgcctctgaatccttcagaccatgccagttccttctatttgtctcctccacttcctcctcttagagctctgggtttgccttttctggtccctctatctgaatatttctttctaaattcgtttagccgattcccccttagctcattccaggtccagtgttctgggtgttggtcttttgctggctttgcctcccagagttggaggcaggggtggccatcttggatctggcaggccaagggtcccattgtctttcagcctgcacttgggtttcgtcttcttcctgctccaaaatgctctgtcctgacattctcatttccttttcctgtcatgccatagcatgacatagtcctttgatgccatagcatgtattaaactcttgtttaataatgagagtgtataagtgattttaaagaacacttttgattctgttgtagctacagacttaggacaaaatctgcttataccttctggaatatgttcttagtcacagaaaattatgttattctctcatttttgatatgggaaatgtttccttatcccccttgcagtgcgtgccatgggggtgtggctcacttattcagtgccctgctgctcaaacctctagggggagcatgcagacggatgggttgtggggcgtgtgggctctgacccccgggcagcatctaggggtgatatttacagctcctgaagccccagtgggcgtgtgttacagggtgctcttttaattttgctctctgtagggggcttgtgttaactagctcagtgagaccctctgtcttatctcaagaacagagggctttctgtatcccggggttcttgccttagtgtaccagaaaaatcagatcacatgtgagtttggagaatgagtgcaaggttttattgagtggaagtagctttcagcagatggatggggagccagaaaggaggatggagctggaaggtggttttcccctggagttgggcagctcagcagctggactctcctctgacttcccccgccccgccaaattcccctctgtgtccatgtcattctgctggtcgatggcctgctggtgtctgctggtgtcggccggtgtgttcttctgctcctctgctcctctcgatgtccagctgcctgtgtgcccttctgccagtgtgttcctcttgacatccagctgcttgtggtctgtgcctactagggtctcgaggatttttaataggcataggatggggatgtggtgagccagggtggtcttggaaaatgcaacatttgggcgtgaaggcatgagtgccttttcttacctaggtctgtgggcacaggcctaagggtggaaccctcgccagggaccctgcccttctctcagcacttccctgctcatctcctgtatcaatttgatggattattgttttatatgtagtatttgcaaacaagattgataattgtatttacaataaaataactgaaaaaataagtaaataatatggattaattatgctgggtaaagctactacaaaaataaattttttgtttttaacatgctttggcgttaatggctgacattaagagagcttttctaatttgctaagcactgttctgtgccatttagataaattaacattttaaataattatgacaattctaagagatagccctgctgttgccctcattttacaaataaagaaatggagacaaagagaggtgaagtaacctgtctaaggtcacacattttggaagaagcagagttgagatttcaaccatgacactggctcagagttccagctccttaacactaggctgtagtgttgctctttgtgctgtactgcagtggttctcaacgtgtggtcctgggaccagcagcatcagcatcacctggggaccttttaggaaggcaagttctctggctacagcccaacttactaagtcagaaattctggggataggggccgggaagctgtgttgaaacaagccctccagggaatcagatggattccagcgtttgacaatacctgttacactgccatctatgttgcaagtgtttttggatttaccttttaagttatgcatccttttgggaaagtagtagaaacttatactatcccagcagctatatggggcatgggttctactaccctcttttgaggtaagaagatgctacgagtagtctccctagaactttattttctcatgtatagattgataggacactctcttcccaccttcctggaagccttgtggaggaaagaggaaatgtcatatgtgattggctttttaaatgacagatggcactgataaaatttaaagtccatgggtaagtcatcaagctggccatctttaactgaggattaattataattatactactgataactgaacagggcaaaagtaagttctgttccctcccttttaagttgttaacttttactggcatgttatttactgtagacagataagggtagaataaagcagtttttcacattcctttcacaaaacctccgaagtcatacagtgaatatagagttacccctggcctcaaacggatgagaagcaattttgccgtctcgtttgatttttttgtcttttaaggcaggccttttctgacaccctaatttttactgatcaccccctggagttctttatttctctttgacacagaaaaaagttatttgttctcttctgcttttgtcacctgtctcttcaagttttctttcttcctatctttttggcattttgaagaaccactgtataaaatattaagcttaggtttttctctatgcactcaatttcagttcctgcagcaaataccatatgtgtcaacctgtttgatgttcagctgctgcccattaccaggtatagcctgaggtagggattacagtagtgcttctcaaactttaatgttataaaaggtacctgggcaatcttgttggaatacaaattctgcttctaacaagttcctgggcccacacttggagtagcaaagctctgtctttggcttttgaccccggctgcacattggaatcatttgggcatgaagccggggtggggaggaacgttgtttaaagactacaatgcttgtcagcacctcatagattgtgcctcagttgatctttttttttttttttttttttttttgagacggagtctcgctctgtcccccaggctggagtgcagtggcacgatctcggctcactgcaagctccgcctcccgggttcacgccattctcctgcctcagcctccccagcagctggtactacaggcgcctgccaccacgccaggctaatttttttgtatgcctcagtcgatcttgagtgaggctgggcattggtaaaagttttctaggtgaccctaaaatgcagccagaataagaggaagccttctttccttcagtggctctctgagctgtcctccatgctacccccagaaatgtgttctaaccgatctgagatagagcagtgtagtggttgaaagcaagactctggatcctagcctaatgagtttgaatctctattcctatgcttactggatgtgtgaccataaacaacttaattagcctctctgtcttggtttccccatctataaaatgcagataagatggtaggtcccattaaagggttatcgtgagttaaagtatgcaaagtgcttacaatagtatattagctatttattgccatgtaactaattactcaaaaacttaatggcttttattatcttaccatttctttttttattattattttgactctgcttgatattatcttaccatttctatgggtcaggaatttgggaataactttggttcagggtctctcatgaagttgcagtcaagatgttagctggggatgcactgatctcaacaggaacgggaggattatctacttctaaaatagttcattcacgtagctgttgactggagcctagtttctagtttctcacagcataggaaccttcacagggctgcttaaaatgtctttacaacatggccgctggcttccctcagagcgagtgaccccagggagagagagcaaggagaaagccacagtagctttttatgactgagattggaaagtcacaccatcacatctgacacattttacatattttgttcattagaaatgaggctctacctcttaaagggatgagtataaaagaatttatggacaaattttaaaactaccacaaatgttttttggctcgtggcaagcaatgtgttaagaaagttgctattttcactagctggtattatatccctttctgaatgtacttaatggtgctgtgttgtcctctagaatcaatggaactttcactataaccagtggaactgtctgtgctgatgagaatgttttatttctgcattgtccaatacagccaccactagcctcatgtggctgttgaacatttgaagtgtgtttagtgtgaaatgtgtttagtgtgattgaggaactaggctttaagtttttttttttttttttttttttgagacagagtctcactctgtcacccaggctgcagtgaagtggcgcggtcttggctcactgcactgcaacctttggctcctaggttcaagtgagtctcgttaggctttaactttaattgtaaatagtaataatttaagtttaactagcacatgtggctagtggttactgtacttggtagctcagttctagtaccttgttttcaaaagtgtgctgctgagaccagcaacacctgtgtcacttgggagcttattagaaatgcagaatctctggccatatcacagaactcttgaatccaaatcataacaagattgcctagtgattctaatatacattaaagtttcagaactactgggttatagtccaaaatctttaaattgcaagaccttaagaacctggggcttcccacgtttcaagtccctttctagtaccctttcccatacattcatttcaatgtctcctaaaacaagggctttgtctaagtcattgcctatggctggagggtctcaacctggaaaaccctactcattctccaagacctggctaaaacgccacctcttccatgactttccccttcatctcactcaagaagtcattgctccctcatttgtattcctggagaacttgatacgccttccacaagatttccatgatgtaatatagttatttgtgtatgtgggttgaggcttgggaccacatcttgatttgtttttctgttgtatgcacctagcataatgcctgttttatccaacacccttgaattttagaaactgatcatggtaaatatattgcatacttcttaacactgaagcagaaatctgcaatccaatacatgtctatatctatagagaaatttatggatactcgcactaagtgagcagttggcctggtctcttcctagcttgttgacaactggatgccaccatacaactgtattgtatgctcagacctggtggtggctgacaggagcattttgaagcattagccctcacttcttcagaatctatagaattgagtcactcgagaaacagaatgagatttcccaggtcaaggacaagctgcattttgtcagatgaatggcaacatccaattcctttttcttgcctatctccatatgtagaaaatgcacattagtaggggttgcaatcctagtctctgataaaacagactttaaaccaacaaagatcaaaagagacaaagaaggccattacataatggtaaagggatcaattcaacaagaagagctaactatcctaaatatatatgcacccaacacaggagcacccaggttcataaagcaagtcctgagtgacctacaaagagacttagactcccacacattaataatgggagactttaacaccccactgtcaacattagacagatcaacgagacagaaagtcaacaaggatacccaggaattgaactcagctctgcaccaagcagacctaatagacatctacagaactctccaccccaaatcaacagaatatacatttttttcagcaccacaccacacctattccaaaattgaccacatacttggaagtaaagctctcctcagcaaatgtaaaagaacagaaattataacaaactatctctcagaccacagtgcaatcaaactagaactcaggattaagaatctcattcaaaaccgctcaactacatggaaactgaacaacctgctcctgaatgactactgggtacataatgaaatgaaggcagagataaagatgttctttgaaaccaacgagaacaaagacacaacataccagaatctctgggatgcattcaaagcagtgtgtagagggaaatttatagcactaaatgcccacaagagaaagcaggaaagatccaaaattgataccctaacatcacaattaaaagaactagaaaagcaagagcaaacacattcaaaagctagcagaaggcaagaaataactaagatcagagcagaactgaaggaaatagagacacaaaaaacccttcaaaaaattaatgaatccaggagctggttttttgaaaggatcaacaaaatagactgctagcaagactaataaagaaaaaaagaagaatcaaatagatgcaataaaaaatgataaaggggatatcacaaccgatcccacagaaatacaaactaccatcagagaatactacaaacacctgtacgcaaataaactagaaaatctacaagaaatggataaattcctcgacacatacactctcccaagactaaaccaggaagaagttgaatctctgaatagaccaataacaggatctgaaattgtggcaataatcaatatcttaccaaccaaaaagagtccaggaccagatggattcacagccaaattctaccagaggtacaaggaggaactggcaccattccttctgaaactattccaatcaatagaaaaagatggaatcctccctaactcattttatgaggccagcatcatcctgataccaaagccgggcagagacacaacaaaaaaagagaatgttagaccaatatccttgatgaacattgatgcaaaaatcctcaataaaatactggcaaaacgaatccagcagcacatcaaagagtttatccaccatgatcaagtgggcttcatccctgggatgcaaggctggttcaatatatgcaaatcaataaatgtaatccagcatataaacaaagccaaagacaaaaaccacatgattatctcaatagatgcagaaaaggcctttgacaaaattcaacaacccttcatgctaaaaactctcaataaattaggtattgatgggatgtatttcaaaataataagagctatctatgacaaacccacagccaatatcatgctgaatgggcaaaaactggaagcattccctgtgaaaactgggacaagacagggatgccctctctcaccactcctattcaacatagtgttggaagttctggccacggcaattaggcaggagaaggaaataaagggtattcaattaggaaaagaggaagtcaaattgtccctgtttgcagacgacatgattgtatatctagaaaaccccattgtctcagcccaaaatctccttaagctgataagcaacttcagcaaagtctcaggatacaaaatcaatgtacaaaaatcacaagcattcttatacaccaacaacagacaaacagagagccaaatcatgagtgaactcccattcacaattgcttcaaagagaataaaatacctaggaatccaacttacaagggatgtgaaggacctcttcaaggagaactacaaaccactgctcaatgaaataaaagaggatacaaacaaatggaagaacattccatgctcatgggtaggaagaatcaatatggtgaaaatggccatactgcccaaggtaatttacagattcaatgccatccccatcaagctaccaatgactttcttcacagaattggaaaaaactactttaaagttcatatggaaccaaaaaagagcccgcatcgccaagtcaatcctaagccaaaagaacaaagctggaggcatcacactacctgacttcaaactatactacaaggctaccgtaaccaaaacaacatggtactggtaccaaaacagagatatagatcaatggaacagaacagagccctcagaaataacgccacatatctacaactatctgatctttgacaaacctgagaaaaacaagcaatggggaaaggattccctatttaataaatggtgctgggaaaattggctagccatatgtagaaagctgaaactggatctcttccttacaccttatacaaaaatcaattcaagatggattaaagacttaaacgttagacctaaaaccataaaaaccctagaagaaaacctaggcattaccattcaggacataggcatgggcaaggacttcatgtctaaaacaccaaaagcaatggcaacaaaagacaaaattgacaaatgggatctaattaaactaaagagcttctgcacagcaaaagaaactaccatcagagtgaacaggcaacctacaaaatgggagaaaattttcaccacctactcatctgacaaagggctaatatccagaatctacaatgaactcgaacaaatttacaagaaaaaaacaaacaaccccatcagaaagtgggcaaaggacatgaacagacacttctcaaaagaagacatttatgcagccaaaagacacatgaaaaaatgctcatcatcactggccatcagagaaatgcaaatcaaaaccacaatgagataccatctcacaccagttagaatggctatcattaaaaagtcaggaaacaacaggtgctggagaggatgtggagaaagaggaacacttttacactgttggtgggactgtaaactagttcaaccattgtggaagtcagtgtggcgattcctcagggatctagaactagaaataccatttgacccagccatcccattactgggtatatacccaaatgactataaatcatgctgctataaagacacatgcacacatatgtttattgaggcattattcacaacagcaaagacttggaaccaacccaaatgtccaacaatgatagactggattaagaaaatgtgacacatatacaccatggaatactatgcagccataaaaattatgagctcatgtcctttgtagggacatggatgaaattggaaatcatcattctcagtaaactgttgcaagaacaaaaaaccaaacaccgcatgttctcactcataggtgggaattgaacaatgagatcacatggacacaggaaggggaacatcacactctggggactgttgtggggtggggggaggggggagggatagcactgggagatatacctaatgctagatgacaagttagtgggtttagcgcaccagcatggcacatgtatacatatgtaactaacctgcacaatgtgcacatgtaccctaaaacttaaagtataataataaaagaaaaaaaaacttaaaaaaaatgcacattagtgatgttagtgcgtcagggacagaaactggagaattggggaggcctgaactgccagccaagaaactgggaccttacccaaggctgacattgttcttctgaataagtttccttttgaatgaaatcctgaatcttttcttgtttaggaggcaggtggttgagatgttacttttgttttcacttgaccctaaaaggagacagctgacataggtagttcaaagtggaaatttaattccaagtcttagaaaccaggcaaaggtagggaagttgtatggtgcttttaaacataatatcctttattggtcccaatgtccatatgaataacatcaattttaatattattttattagccctaaattattaccttttattcttcaagcactgtccctacaatgctagaatttgctgaaaagtttatattggccctgctcagctccaaaattaagcatgtcccattcactaaatcttaatcctgaatccaaatcaaattctttttccactactccttttcttattgcataccaaacagaggccaaaactttaataagaatggcatcaaagtaagaagatgtagcattctatactttgtcagttactgatttaaccctatattggtcctgtaatacacaggtagcataacaggctatttgcaaaagtccctaaaattctcttagaaggaaatctgatgtattgtatccaatgcatgagattttgaatgagcacagaaggataattaatatacattgtagtctattttcgcaggtcatgggagtaataattttttttttttttttgagacagagtctctctgtgttgcccaggctggacgtagtggtgtgacctcggtttactgcaacctccacctcccaggttcaagcgattctcctgcctcagcctgccgagtagctgggactacaggcatgaaccacagtgcctggctatatatataatatatatagtattttcagtagagttggggtttcaccacgttggccaggctggtcttgaactcctgacctcaggtaatccacctgccttggcctcccaaagtgctgggattacaggcgtgagtcactgtgcccagccgagagtattataaaattaaatgttcaagtccaagcacttggggtcacctggtggtctaaacagatgcatgactccttgtatcacccacatcagaattcccaacttaaccccaagcaggtgaaacaagtgtgtttaaatcagcaggagccagtagtgacttagcttaacacctgtcttttaagataatgcacatgtgaaacaaatgcattcttgggcatttaggcttatgatcttccattttatgtttccttcagcctacatactaaagaccccaaatctttgtccatggtacagacatcttccctcagttccagaaacatgttcatccgcctgttggtatcgacagctgaatgttctacaggtatctgaaactctgtctgtctcatgctgtctcagtttgtctcattatacttcctctactcatcctttaacttacagaaagttggaaatcctgtgagatgcccccatctccctaagactccataattattaagtgatcatagaggaatacaggaagtagtcttgtatgacattttgccaaattgttttccaaaaatagttttaccagtttatattcctatcagcagtatatatacatttctgtttttctgaattctgctgaacatttgaaatattaggttcacattttttccgatttgacgagtgtggagatggtaactcattttggttttattttgaatttccctgattattctcagtgagactgagaataccttcatatatttattgtatatttatttttttccttctgtgaattgcctattaataccttttgcccattttccattggattgcttctcttttttcagtaaaagtgctacatatattctgagtactaatcctttgttggtgttatatatggaaaagaactttttctagattgtggcttgtcatttcttttcctatgttgattttcatgagagatgaattaaataaattagtgcagtaaatttttcaatcttttgttatctgtattttgcttttgcatgtcttatttaaagagatccttccctacttcaaggtcatagacattctcctacacattttattctaatttttaaaaagttttgagttttgtatttatgtctttagctcagctggaattcattttgtatgaggtgaaaatctaatgtgcttaaaaaatttggacaactaattatcccaggaattatcaaatagcctatttttataggtctgcaatgccctttctatcaaatattaagtgtctatgtatgtttgggtccatttttgggttctctgttttgagcaataatcagtttatccatctttgtatcaaatactttctagatttctgtagctttaaaatctttatatttggtaaggcaagtttctttacttatatttaaatatttctcgatttttttgccttttctatgaaatttagaatcagtgtatcaagtatgacaaaaatttatagattaatttgactttaaaaaatcttatcttcctattaattttgtatcttgtttaaaaaatcccatttcctaactcttatggctgcataaaaatacgattgattttatatattgattctgtttttggcaaccttactaaactttctaattaattatgataaattatatgcatattcttttggattctctacctcagtagttgtactgattttaaaaagtccacaaattttttgatacttctcaattcaagaggtggagcctaatcactctcccttgagtgtgggttagatttaggaacatagttttaacaaatagaaaacgtggaaatgatggtgtgtcacttctgagatttggttgtaaaagacactgcagcttccatttggccctctgtctctgtctctttgtctaatggctcactcagaggggagccagctgccatgtcatgaggacattcaggcagccttgtggaaagcctcatgtggtgaggaactgaggccacctgccaaaagtgggaggaagtgaggtgttctcccgacagccatgggagcaagccatcttgaaaatgcatcctcccgtcccagtcagcctttcaggagactgcagcctcagcagacatttcaactacaacctcctgagagacctggagcctttaagctgcttctagattcctgaccctcagaagctatttgaagtaataaagatctttttttgggcaggaaaaattcaacatatattttattctaactatataaatattattcacagccaagtcacatagtgtactaagaagaaacttattttcctatgtaaccttttgcttttcctagagctaataattgtttcctctgttttctgttttatttgcttgtttcctttgaagctcttagcaattctttcatctttaatgtctcaattactctccatcctcaggccaagacttagatttgcaaacacagtaacaacttttaactttctttcaactttataggaagctcactttacactcagtaagatataattcttgaaaaaaattattgaccaaagaaagcctattttttcctcatttgtttttctctctccttcaatagctttattggaatattattgacataaaattttatgtacttaagctgtacaattcgatgtattgatatatgcatgcatcgtgaaatgatccccgccttccagccaattagtcacctctactgttgccatttttgttttgtgtatgtgtgtgttaagatttactttaaaatctatcagtttagcaaatttcaagtatgcagtacagtattactcctattgtcaccatgatgtacattaaatatccaaaacttactcatcttgcataactgaagctttgtacactttgggcaacataaccccattttgccctcccccaagtctctggcaaccaccaccctactttcagcttctacgagtttattttagattccaaatgtaagtgaggtcatatagtatttctctttctatatctcacttatttcgcttggcataatgtccctcagttccatctatgttgttgcaaatggtaggatttccttctttttttcaggtagaatcatatttcattgtgtatataaaccacattttccttatccactcatttgtcaaagaacatttaggttgtttctatgttatggttattgtgactgatgctgcaatgaactttggagtgcagatagctctttgacatactgattttatttcctttagatatatacccagaagtgggattgctggaacatatggcaattctacttttaattttttgagggatctccatactgtttttcataatggctgtactagtttacattctcatcaacagtgtacaagggttcctttttctccacatccttactaacacttgttatctttttgtttttttttgaaaacatatcctaagaggtgttatacgataccttactgtagttttgatttgcatttccatgatgattagagatatccagcaccttttcatatacctgttggctacttgaatttctttttttgagaaacatctattttggtcctttgcctgttgtttactcaggttatttgtttgtttgctattgagttgtaggcgctccttatatatattggacatcaaccccttatcagatatatagtttgtaaatatttcctctagttctgtaggttgccttttcactctgttggttgtttcctttgctgtgcagaagttttttggtttgatgttgtccttcttgtctagttttgcttttgttgcctgtgctttaggtgtcacgtttaaaaaattattatcaggactaatgtcaaaaaggttcttcctccttttttttttttttttgagacagagttttgctcttgttgcccaggctggagtgcaatggtgcgatctcggctcactgcaacctctgcctcctgagttcaagtgattctcctgcctcagcctcccaagtagctgggattacaggtgcccacaaccacacccggataattttttttttttgtatttttagtagagacggggtttcaccatgttggccaggctgatctcaaactcctgacctcaggtgatcctcctgccttgacctctcaaagtgctgggattacaggcataagccaccatacctggccttttccccatttttttaaaaagggttttatggtatcaagctttacacttaagtctttaatccattgatttgatctttgtgtatagtgtaagataagggtgcattgtcattcttttgcatgttgatatccagttttcccaacattttggaagagactattattttccccattgtgtgttcttggaacccttgttgaagataatttgaccataaatgtgtaggtttatttctgggctctctcttctgattcattagttgatatgtctgctttatgccagtcccatactatttcaattactatagctttgtaatataattgatgtcaggaagtgtgatgcctccagcttttttctttcccctcaagattgctttgtgtgttcgtctgtttttgttgccattaaggaatgcctgagactgggtaatttataaagaaagaagtttaattggctcacagttctgcaggctgtagaggaagcacagcagcatctgctcctggtgaaggcctcaggaatcctacaatcatggtagaaagcaaagggggagccagggtatcatatggtgagagtgggagtaagagagaagggagcaggggggctggaggtgtcatactcttttattattttatatttttttcagcaataatgttgatttactatcactttatgcaccagatctgtgaaaacacacaacctatgttctatgctctccagaaaaggacaagcatcatgaggatcatataaaacatgtacaatcaaaatacaatttcatgattgactataccattggaaacacatatgacaataccagttggtgatatcactgagatcactagagccaggtgagataatctacataagtttctccatagaattaaattttgagggcgatttgctgggattgaagataaacagaaactgaggaagaatttcaggcaattacctggtccagcccccaacaagtgcaaataaagacctggctctcaaggaaaatcaatacatcagttccctcttagatgtcaaaatcagaatctccaaatgcactgatttaataaaacaggttttatcaacctaatgatcaatatgttctcacatattcgtaaaatcgcctttaagtcctttttaacttttgtggtactctgaagatgtgagaagctaattagtatcattttcataaaatctaatacataagataggaggcttatatagtgagtgacagtcagtgttgtgtcacctaatggccaaaaataacccaaatcattgaaccttttatcacatatcctgttttgatcctgataatcatttttaaaaattgaaatcagctttatttaagaatttccagcattgacaactcttataaaaagcatccaagcacagggcacagaactgtagcaaacagcattcttacgggtagctaacagacattagaacttccacccttctttgagacacctgaactcactgtgaactctgcttccaagtactccttcaaagcataccacaagctcagtttatattctcaactcatcagcttcagttcacattaccacacttatgtatcagtaacagaagagaacacacaccatacagcattcacagcagttgacaaaagggtaggaaaatacaagtatcgtttcacttaacacattcaactaatgtaggttgcctaagaacaaagctcactgaaagtcttccaacacatgtggatgtcctttgaatacaaaagacattcatacattgtttattattgttgtctgtatactctctcaccaaaattacaggattgagagacacatctcaacaagttaaaaaatattcatgatgcaccatcaactctctacctgcactctctccttctctcactcatactagccttccatgccttggcagcaccaccaattccacacaaagtttcaaaagttcagacagcctctggttccatatcacagccttgtgttcatgacgttgataagactccatgaaataaagcatagtgaatcaaaatgggaacacccactgtcaaagatgcagcctgtgaagtgtgatgacgaattcttgaatgagaaagcatgtagacagaagtatttctatggcaggatatttacagcgctactttcaatgaagtgcttctgtaaacgtttgaaatgagatgcactgcagagattaaatgaaggcttcatatcgtacttttctatatcaggtgggtggagtgacaagtgttaaaaaacaaaacaaaagaatcaaacactgtgacaccatgatctcccaaaaggagattttattaaggaaaaaaaatcatatggtggggttcaaatgaagacaaggagaaaagaatgtagttctcatcaatgttttccattttgagcacgcaaagagttcacttgagaagtccagggataaaatattacagatatcaattgtaatgtgttgattttccaacagacaaacagccatttgcttttaaccactcaatatttcaactctttatttattcaactctttgtgtaactcaactcttaatgtattcaactcttcatgtaactctacgtcacaaaacttatacaattcctttatctcttcctctttttctaaagaaaaatgtcaaaaatactgctgaatatactccacactgaacaaaccaattttgaaaagttttgtatcttaccatgtacattccgtaccaacaaaccataacccaaagtctacatttcccagccagaagattgagaatccatgcttgagccagagcctccattaaaaccattgcctgatgctgattcccaaccaattgctgcaccagaattagaaccactgtaagagttatttctagaaccaaagacctggtttggctccctttgcatgttgccttgactttggttattacctgatgggcctgactggttctgctggctggctaacatgctcatcctaccccaactgctctgcagcgctgcctgggctgcagccatcatggctggattaatgctgagcacaccaaaattcatctaccacctgtattggtacctcgattgttttccaagccagatccacccctctactgttaccaaatccactcagattcccaaatcttccacttctttctatctattgctgtcgtgtgattaggtttggcactggatatatgcatgctgagtcctttaatgatcaagtcctctccacaaagagattgggcaatctgatcaactgcaaatgtaacaaaggcaaaggccctgaatggcttggggatgaagacatccaccacttctttgtactgacagaaaaactgccatagctcatctgcagtcatgtcctctgtacagcgccccacaaacacttctctgcttctcaaaggctcatctgggctttgcttagagttgggaaatttacagtcataccatcatccatctatcatatgtcactgtgacattactttcacgtgtctttcatactccataaaatgaacaaagccaaacccttttgaccagttttaatatctatcttgacttggacttctccagaggtactaaaatattctttcagatcctgtttccataggaggaaaaacaaactgagagcaaaaactcactaattaccaacgctattaaataagatattttctggactgctcttcactttcactgccgtctcacccatttttcttttgttatctttgggacagttgacaacatataccagatttccacagtcagcatcagggcatgcagaattccttctaccagctggatacctctcatacactgagacactggattcttgtagtgaagtccacatgcccctggaaactgggctgtaactgtggacagcagcaccaccccattgtcttctgatgatatttcaacgagctccttattctcaacttcacttaccctagtgtattcagacatcttttatttctctacttaggccactgctagaaagcccaacagggacactgaagcagtgacagatccaagcacagcttagtttattctccttgataatcatttttattgttcttcctgggactcattcaagactttctagaattcatattaactcatggccaaacatgaaaataagttgtaacaagggggtacgtaatgtagaacatttggaagagctgtctctttgttcttgccagccacgttcctttggatgtttagcttgttagcagtgatcatcatggccaattacttgatctgcatcatcatcctacataagcaattgttatgtcttcagtgatgacctgagaggaaaatacactccaatggcatggtaaatgccctttctgcaggagggacaagtaagaaagactcaggatgctgcaattcaggaggctgagctctaacccttagcccctaaacccactgtctatgagaagccatgctgaaatttagacagcagcacatcacagacctgcacaggcattgagctggcagggcattgctcaatgatggtaggtgcagtgtttacagaagtgtgtaatgtgaagtgctagtgcacaagggccctatggttaaatgtgtttgaaaaatgctgcatactatatccattggccacacttttaaacaaccagatcttgcacaaactcagagcacaaactcactaattactgtgaggatggcaccaaaccattcatgagggatcagtcgtcatgacacacacatctcccatcaggcctcacctccagcactggggattacatttcaacatgagatttggagggaacaaatgtccaaaccatggcactttggctatttgggatccatataaatttaaggattgtttgtttctatttctgcccttgggatttcgatagggattgcactaaatctgtagatagcttagggtaatatggacatttttaacaatattaagtcttttaatcaatgaacatgagatatctgtttatttgtgtcttttaaaactttgtcaaggttttgtaattttcagtatacaagtcttttacctgcttaagttaattcttagatattccattttgttgctaatgtaaatgagattgttttcctaattttctttttagatatttcactgttggtgtatggaaatgccactaatttttgtatgttgattttgtaccctgcaactttactgaatttgcttattggttgttccaacagttttttttttttttggtgtagagtgtttagagttttctatgtatatgatcatgtcatctttaaacagagataattttatttcttcctttctgatttgtatgcctttttatttcattttcttgcctgattgctccagccaggacttccaatactatgttgaatagcagtggcaagagtgggcatccttatcttgctctggatcttagaggaaaagcttgttttccccagtgattacgactttaactgtagttttttcatatatagtttttattgtgttaaggaaagctcctcctgtacctatttggttgagagtctttaccatgaaaagatgttgaattttgtcaaatgcgttttgtgcatctattaaggtgattatgtggtttttgtctttcattttgttaacatggtgtgtcacactgattgattttcatgttaaaccagctttgcatcccaggaatagatcccacttcattatagtgtgtgatccttttaatgtgctgttaaattcagtttgctagcagcttattaaatatttttacatgtatattcaccagggatagtggcctgcactttccttttcttgtattgttgttgttgttgctgttgtttttttctggctttggaatcagggtgatgttgttcttataaaatgagtttgggagtgttccatcttctatttttggaatagtttaagaatggttagtattagctatttttaaaatgtttgatagaactcatttatgaaaccatcttgacctgggcttttctttgttggaaagtttttgatgactgattcaatctccttgcttgttattggtcaatttgtctttctagttcttgattcagtcttgatagcttgtgtgcttttaagaattaatgcatttcttctaggttatccaatttgttggtatataattgttcacagtagtctctgtgattctttttgtttttgtgtcatctattgtaatgtctcctttctaaaaaacttctgattgtatttaagtcttctctttctgttttgtattaggctagcaaagggttggataatttcatcttctcaaataaaaccaattcttaattttattttttcctattttttgcttatttttgcttcaatctttattatttccttccatctgctaactttgagtttagtttgtttttctacttttagttccttgagttgtaaagttaagttgtttaattgagatatttcttcttttttaaggtaggcacttaacactataagattttgtcttaatgctgcctttgctgcataccatacactttggtaagatgtgttttgtcttcatttttttcacggtaattttaaaatttctgtttgctttattctcttattcaatggttgttcaagtgtgtggggtttagttttcttgttcttgtgtgaattttcttgttttcttgatattattgatttctagtttcattccactgtggtctgcaagatacttgatataattaaaatctttttaaatttttaaagacttgttttaagacacaacgtatggcctattctggagaatattctgtgtgcccctgaaaataatatgcattctgctgctattgggtggaaaattctgtctatgtctattgtccatttgattcatagtgttactcaagtcagtggtttccttatagtttttcagcctagatgttctatccattattgaaagtggagtattgaagtcttcaattattattgtattgttgtcagtttcttccttcagatataccaatatttgttttatatatttagttgctctgatgttaggtgcatatatatttacaattatatcttcctcttgaattgacttttttaatcattatataatgatctttgccaatttttgacttaaaatcttttgtctaagtatagctctccctgctttcttttggttgccatttgtatagaatatctttttctatcccttcactttcaggctatgtgtgtcctcacatttaaagtgaatcgtttatagacactaagtcactggatcatgttttttaatccactcagcaactctatgcctttacattggagaatttaatccatttacatttaaagtgattgttgatatgtaagaacttacaattttgttaattgcggtctgttttgcagttcttttgtaactttctctcttttgttatctccttttgttgtctgattttttttttttttgtagcagtttggtttggttcctttctccttgtctttttgtgtatctattatagacttttcttttgtggttaacatggggcttgtgtaattcttcttgtagttataagcatctattttaatttgataacaactcaagttcaattgcatacaaaaattctgcactttatccccttccacacatacactttgtgttcttgaagtcagaatttttatattatgagtctgttcacaattttttaaaaaatgtgtttttaatcaacacaaaattgtacatatttatggaatacatagtgatattttaatatatgcagtgtatagtgatcaaatcagggtaatcagcatattcatcacctcaaacatttatcatttgtgttgagaacattcaaaatcctctcttctagatatttgaaaatgtataataaattattgttagctgtagtcaccccacagtgctataaaacactggaacttgttcctgctatctagctgcaaattttgtataatctaatagatccctacctattcctctcattcatctcagcccctagtaactactattctactctccacttctatgagatcaacatttttagcttctaaataagagtgagaacatacatgttaccgaatttttctgtttatagttgcttttttttttttttttttttttttttttgagacggagtctcactctgtcgcccaggctggagtgcagtggcgcaatctcgactcactgcaagctccacctccagggttcacgccattctcctgcctcagcctcccaagttgctgggactacaggtgcccgccaccatgcctggctaattttttgtatttttagtagagacagggtttcaccgtgttagccaggatgttctcgatctcctgacctcgtgatccacccaccttggcctcccaaagtgctggaattacaggcgtgagccacggcgtctggcctatagttactcttaatatttttgtcttttaactgttacgttaggcttataggtactttgcataccaccattacaatgttatattattctgtatttgactttatttttacttttactggtgtaatttatacttttatatgatttcacattgttgtttagtgtgttttcaattccatttgaagaactccctttggcatttcttttaaggaaggtctagtggtaacaaaccatccaggttttttttggtcctggaaagacttaatgtctcctacatttttaaaagatagctttgcagagtaaaatattctatgttggcaattatttttcctctttctttttggacaaagaagaggaatatacattattatttctcgattcctcctcacttaaggattaggttgttatttgtagtgtgtacatggctccagaatatttttcttcttacagaatgttcaacattacagcttgctccctctgtaattggaatatataatgttactgtcttcttgtctgtaagttttatgtcgagaaatctgctaatcttggtatagatctttttgtattaaacctatttggagtcctatatacttcttgagtctgaatgtctatttcctttcccagatttgtaaagttttctattatttctttaaatatactttcttgcactttcttttttggtaactcctataatatgtatattggttcacttcacaagatgtatattgtttccataaatctcatagtctttttcactcttttcattgtttcaatattttctcccctaattgaataatttcagatgatctctcttccagttcatggattccttcatctgcttgatccagtctgctattgtagctctccattgcatttttagttcagccattgtattctttagcctccatcatttctagttttaaaaaatgttttctatttctttgttgaatttctcattttgttattgccttgttttcctaattgttttttgttaaatttgtttatctatgttctttcgggctcacagagcttctttagaacaattattttgaattttttgttgcacaattcatggattttcctttctttggggtcaggcactggaagttaatatttttgttggtgttgttttcctgatttttcttgtttcttttatgctttcattggtatttgtgcatttaaataaataatcacctcttctagacttatagactggcattggtaaggaaagactttcacttgcaggggagagggagcatgggattcctggaactgggcatgggaaggcatgctggagtgtgctatggtacaccagatccagtggtgcatggtgttccaatttggaggtatgcagaagctctgtgtccaagggaacttggtggttggtgtctcaggtagcaggggtctgtgatatgggaaactttgtagtccttggcatcaaaagcttcaagggagtcaacagtgattgtaaaggctgttggagtcctcagtagtgcctcttgttacagtggcaagcatatgtaggagggtcagggtaggtggtggcatgggccagtgttggtggttgtgtgctggttttggggtatggggccagtggcatgtgtatgctcagctgtggaggctggctgcaagcacatatgtggtggtggggactggcagtggcgattgaggttggctacatatgcacacaaggtggttgcattgaatctcaggactggggtgaccatggccacactggctggaatggctccagtggtgggacgtagggaactgcagctgaggcagccatggtcttcaatggcaaaaactgtactgccctcatcagcaaaagctgtgggatgtctgtggctgctatgatggctattggtttctttggcagtattgggacaacaggccactggggaccgccatggcttctgtgtgtgggtaatactgatagtaccacccttctttgtttctagccatctccagatatcttggtacactgatctcagaaatctgagtggagtgaaaccaaagtaagttttttaggaagtaccttgaaagactggggaagctgattccttatcttgcttgtttttttctcatgagagaaattcatgggttgaagagatctcttttgctacttagctgtccttccctggggatgggctgatgtaggaaaaatgaaactgttcttcttaccttttttgtgtggttactcaattttctttttctccagtgtgctgctgtagctttttaactgcactcttgaactctcccagagctattttttgttcagggatacctgccttaattgttattttttggggatgttgaaggctagaatctcctactccacaatcttactgatgtcctccaaagatttgttattttaagctgttaaattttggggtaatttgatacatagtaattgacaatactatatgattaagtactcttgtcatacagtctgctaataaggacaattttcttttccttccttccttcctttcttccttccttccttccctccctttctttccttccttttcttcctccatgtttccttcctcccttttcctccctctttccttccttcctttcctccctctttctttcctttctctctttcctcttctctttctttccttccttcctccctcctttccctcttccttttctttcctccctctttctttcctccctctctctttcctcccttttttctttcctttcctttctccttcctttctccttccctccctccttctttcctttctttcctccctctctctttcctcctctttctctttctttccttccttcctccctctttccctccctccctcttccttccttccttttccttcctctttctttcctccctcttttcctccctttctttcctgcctctctctttcctccctctctttctcttttttctctttcctttcctttcttttctccttccttccttcctccctccctctttctttcctctctctttcaaccctctttcttttgctaacgacctctgcatacagtgtgcagtttgttcaatacttatacttttaatttctttttctgtacaaggttggacagaaactgtgatagtagctcacttgatttggttccgattttagaggaaatgtttcccagcatatcacctttaagtataatgtttgctgcagattttggggagattctaatcagtggttggttccatttaatttctttttatttaagagcttttatttatttactttaaaaatcataaataggtcttatactcaaaaaggcattcaacaaaactcattgtaatgatcatacggggttctgttaatacctgttaatataatgagttataacccactctattttaaaaggttaaaccattctttcatatatagtttggtcatgatatatctgttgtgaatgaatcgtatgtattaatctgaaccttgtacttaagatttttgcactgatgttcataagggaggcactcctgtaattttcctttcttttactttccatgtctgattttggtttcaagtctgtgataatattataaaaataattagggatcattttcagtttttctatttcctggatgagttggtataatgtagaattaaatatttcttaactgtttgtacaacttgcatctaaaaccatctggacatgggtttttatttgttcccccataagtacattaaaaaaaaaaaactgctgattcggtttctttactggtcgtaggattcttcttgtttctacatcttgagtctgttttggtaagctacattttttcctagaaaatgtctattttatcataagttttcaaatttattagcatataattttacataatttagtgattattgtaatttttctttccctacagtttgccacccttttcacttttgaattattttacctaatctgcttttcttgataaaccattctattatatgttcattaaaatttttcattagtttcttctctttgcttaattatttccttctacttttattttattattttttaaacctttaaagatgggtgcctagcatcttcatttttaacatttttcttctttctaagtatattagtccattctcacattgctacaaagaaatacctgagacaaggtaatttataaagaaaagaggtttaattggctcatttctgcaggctgtacaggaagcatagtgacatctgcttgccttctggagaggcctcaggaaacttacaatcatggtggaaggtgaacggggagcagacacgtcacatggccagagcgaaaggaagagagagtgaaaggggaagagctatacacttttaaataatcatatctcaagagcactcagtcactatcacaagaatagcaccaagaggatggtgctaaactattcaagagaaatctacccccatgattcaatcacctcccaccaggccctcatttcaacattggggattataattcaatgtgagatttgggtggggacacagatccaaaccatatcagtaagataagtaataatagccaagcaaataattctcttgtcttaacagatacatcccacaaactttggaatgtagtattctcatttctcattattttttaattgcaagtattttaagattttcagtataattcctttttagacaatggattattcagaaatgtgtttttgaatttgcaaaacattttagttttccttttctctacatttctacttaattatataatggctagagaatattacctatatgatatatgcgaaacttaatggaacttgctttaggtcctgggacgtggccaatttatgtaaatgttccacatgtacttgagataaatctgtatttaacaggattctatatatgtctattagaccaagcttgttaattgaatatactctatacactttttttttcctgcatagtttactgattactgacagagtgcatttaaatcttcatttctctttgtttttattccatgcttttggctttacataatctagtgctctgtttttcagatgcatgtaagtttagacttacatcactttctgattaggtaaatgatttatcattatctcttatctttgataactcataatttgaaaacttatactaaatagaattaaaaacgaaaactatatgatcatctcaatagatacagaacaagcattagataaaatccaacatccctttatgataaaaatccttaacaaactaggaattgaagtaacatacctcagaataataagagccatctgtgacaagcccacagccaatattatactgaacaggcaaaagctggaagcatttcccctaagaacagaaacaagataaggatgtccattctcactgcttctattcagcacagtactggaagtcctaaccagagcgaccagataagagatagaaataaaaggcatccaaataggagaagcagaagtcaaattatgtctcttacctgatgatataattctatacctagaatactctaaagattctgccaaaagactcctagacctgataaacaacttcaggaaagtatcaggatacaaaatcaacatacaaaaatcagtagcatttctatacaccaataatgctcacgctaagaaccaaatcaagggctcagtcccatttaggataaccactaaaagaataaaatttctaggaatgcatctagccaaggaggtaaaaatttctacaaggataactataaaacattgctgaaggaaatcacagatgatagaaacaaatggaaaaacatttcatgcttatggattggaagattgacattgttaaaatggccatattgcctaaagcaattctacatatttaatgctattttaatcaaattaccaatattatttttcacagaatttggaaaaactattctaaaattcatatggaaccaaaaaagagcccaaatagccaaagcaatccttagcaaaaagaataaagctggaagcatcacctcggctgacttcaaactatactataaggctacagtaaccaaaacagaatggtactggtacaaaacagacacatagaccaatggaacagaagagagaacccagaaataaagctacagacctacaaccaactgacctttgacaaagttgacaaaattaaaaaatagggaaaagaggactccctattcaataaatggtgctgagatagctggctggccatatgcagaagaatgaaactggatccctacctcttaccggatataaaaatgaactcaagatggattaaagacttacatgtaagacttaaaactataaaaatcctagacaaaagccttcgaaatactcttctagacattggcctaggcaaagaatttatgaccaagtcttcacgagcaatcacaacaaaaacaaaaattgatccctccgcagccgctgccagagcggaagggcggggtcttgtgcctcccccacccccaacccaatgggtgaggagcgaggaaggcagcgcggcgtggggactgagcccgcgggtgcgcatcctgaggcctaggctacgtggtcacgtcagcgcgggagagagagagagaggagctgactcagcagggactggggtactgggtcgagagtgcgagcaagcgagccagaaggggaaaggcggctgctcgtgcctgagctaccgcagaggggagtgggaacagtggggtaaagggggggggggcgggaataagaaaggccgagagaaggcagacagagggtggtggtggtgggggtggtggtgggggtggtggtagggggagagggagagggaggagctggaggaggttagaaggaggagctggaggaggctagaaggaggagctggaggaggttaggggctgagggagtgagtgagtgaagcggacgcgagggaggggagggaagggaaaggaaagggggggatcacgcaggggcgcgcgcaagcaccgggagcgcgctcggagacgagtggaactggatagggtttgctgtcagcggcgtgagcttcggccgccattttacaacagctccactcgcgccagacacagggagcagcgagcacgcctttcttgcaacctggtaccatcggacaggattcctccccctcagtccaacggggagatctttggaaacatggctacagaacatgttaatggaaatgatactgaagagcccatggatactacttctgcagttatccattcagaaaattttcagacattgcttgatgctggtttatcacagaaagttgctgaaaaactagatgaaatttacgttgcagggctagttgcacatagtcatttagatgaaagagctattgaagctttaaaagaattcaatgaagacggtgcattggcagttcttcaacagttaaagacagtgatctctctcgtgttcagaacaaaagtgcctttttatgtggagtcatgaaaccttataggcagagagaaaaacaagggaccaaagtagcagattctagtaaaggaccagatgaggcaaaaattaaggcactcttggaaagagcaggctacacacttgatgtgaccactggacagaggaaatatggaggaccacctccagattccgtttattcaggtcagcagccttctgttggcactgagatatttgtgggaaagatcccaagagatctatttgaggatgaacttgttccattatttgagaaagctggtcctatatgggatcttcgtctaatgatggatccactcactggtctcaatagaggttatgtgtttgtcactttttgtacaaaagcagctcgggaggctgttaaaactgtataataatcatgaaattcgttctggaaaacacattggtgtctgcatctcagttgccaacaataggctttttgtgggctctattcctaagagttaaaaccaaggaacagattcttgaagaatttagcaaaagtaacagagggtcttacagacgtcattttataccaccaaccggatgacaagaaaaaaaacaggcttttgctttcttgaatatgaagatcacaaaacagctgcccaggcaaggcgtaggttaatgagtggtaaagtcaaggtctgggggaatgttggaactgttgaatgggctgatcctatggaagatcctgatcctgaggttatggcaaaggtaaaagtgctgtttgtacgcaaccttgccaatactgtaacggaagagattttagaaaaggcatttagtcagtttgggaaactggaatgagtgaagaagttaaaagattatccattcattcattttggtgagtgagatggtgctgtcaaggctatggaagaaatgaatggtaaagacttggagggagaaaatattgaaattgtttttgccaagccaccaaatcagaaaaggaaagaaaaaagctcagaggcaagcagcaaaaaatcaaatgtatgacgattactactattatggtccaccttatatgccccctccaacaagagatggagggcgaggaggtagaggtggttatggatatcctccagattattatggatatgaagattattatgattattatggttatgattaccataactatcgtggtggatatgaagatccatactatggttatgaagattttcaagttggagctagagaaggggtggtagaggagcaaggggtgctgctccatccagaggtcgtggggctgctcttccccgtggtagagccggttattcacagagaggaggacctggatcagcaagaggcgttcgaggtgcgagaggaggtgcccaacaacaaagaggccgcgggcagggaaaaggggtcgaggctggtcctgacctgttacaatgaagactgacttggtatgtgggattacaccagaagcttgcaatggagtaatggtaaggaaatcaagcaaccttaaatatctcggctgtataggagcatattctattgcagaagaccttcctgtgaagatcatggaatcaaatacgggacattaaactaatacttggactttgatatgaatttctttaacaattttctctgcagtgcaagttattaaactaaagctactctattttcaaaatgtgttccaacagaaatccttcataactcctagcatggtatcttaataaagaataaagttctttaaaaaaaaattggtaagtgggaccaaattaagagcttctgcacagcaaaagaaattatcaacagaataagcagaaaacctgcagaatggcagaaaaatttgcaaactatgcatctgacaaaagactattacccagaatttataagtaacttaaataaagcaacaagaaaaaaaaactgcattagaaagtaggcaaaagacatgaagagacacttctcaaaagaagatatataagcagccaattaacataaaaattcaacctcactaatcatcagagaaatgcaaatcaaaaccacaatgagataaccatctcacactagttagaatggctgttattaaaaagtcacaaaataacagatgttggtgaggttgcagagaaaaaggaccactcatacactgttggtgggattgtaaattagttcagcctctgtggaaagcagtttggggatttctcaaagagctaaaaatagaattacaatttgacccagcaaacccattacttgggtatatactcaaaggaaaatatattattctaccaaaaagtcacttgaacttgcatgtttattgcagcactattcaccatagcagagacatggaattaacctaggtgcccatcaatgattgattggaaaaacaaaatgtagtacatatataccatataatactatgtagccataaaaaaaaaaaaccaaatcacgtctttcgcagcaacatggatgcagctggaagccattgtgctgtacaaatacagaaacggagagccaaataatatatgttctcacttataagtgggagctaaacattggatactcatgaacataaaaatgggaataatagacacttgtgactttaaaaggagaggaagagaagagggaggcagggtttgaaaagctacatattgtttactatgttcattgtctggacgatgggtttgactgaagcccaaacttcagcatcatgcaatatatccatataacaaacctgcacttataccccctgaatttaaaaaaaaaaaagtgcctttaaaaaaagcaaagctggtgccatctgatgttaatattgttataccagctttcttttgattcaaagttacttggaatgagctgtttatgtcactgaactcaatatttctgtttccttttatctgacatatatctttggttaacagcagatagatggatctgacctaagaagtcttctctttaaactggctaatttagtccaataacataattatggcaactgatatacttaatttatttcaagtatattttgtatgtctctaattttgtattttaaatttgaactcaattttctatgttgctttgtttttgctttcttgccctctatttgattagtaagctttgttacgttttctgtctaccctttgaaagttttatactctttttctttaatggttattattcaaatactaatatgcatgtctaaagttaatatttctatcctcctccatggaattcaagatcttagaacactttaatcatacgaccattgtaaattttattgttttccagtactttattctaatccttagtttaagcactattatggttattttatgtacttcttatttgtagaggttatatatttacaatttgtttgctcaccattcattcctacatcatggacttctatttatggatcattttcctgttttcctggagtacattcctttagtaaatgcatataagctgtaatttatgtcagttttggttttctgaaaagtcttaattttaccctcagttttgattagccatgtataggacaggttgacaatttttttctcttagtatttgatgatattacactaatgtcttctaatctgcatagttgttgttgagatgtcaatttgtgttaaactgttgtgcctacgtagataactaaaaaaaaaaaaaaagaatctgactcttaaattcctcagtgttctcagaacaccaggaagtgtgccatttgccagatgaagatggaggaggaagagctgtagtttgaacaaaaaagaaaatataagaaatagtcatctggccaagtgagcctgtgaatgagtaagagaattgtatgatccctggcacacaaatgatccacttaaaaagagatcagtcaggccaggcgcggaggctcatgcctgtaatcccagcactttgggagggtgaggcaggtggatcatctgggatcaggagttcaagaccatcctggccaacatggtgaaaccccgtctctactaaaaatacaaaaattagccagccgtggtggcacttgcctgtaatcccagctactcaggtggctgaggcaggagaatcgcttgaacctgggaggcggaggttgtagtgagccaagattgcaccactgcactccagcctggaagaagacggaacgagactctgtctcaaaaaaaaaaaaaaaaaaaaaaaaatcagcatggttgcgtatcttttgctctccatgttgagcagcccaagtataggtttacagaaagtaaaaaattagatttaacaagggatgaggttctgctgttctgtgaaagggctgtacagtcaaagtgatctacaaatgctgaaggtgccaagaaaccatagaacaaggcagacaagtccagtttatcagtaaaagttgatttattgggggaactcacagacagaagcatggtcttgggccactgcaacacaggtagatctccacatctgttactcccagacctaagacttatgtactatgagaaaaaggtgtacatgctctagcaaggcaattaaaggtaacccctagaacagacaagaatactgtgtgcgtcatagtctataatttgtgtgctaacatcaagatgacatgttcttatactaaggacagtaaataaagtgggaatcaggagacattcacaggactggggctaatcagaagtcaacgtggtggattagcacccatgatggaaccaattttgtctccacatctgctaaataaatttattaataagaaaaggagggggagcaagtggaacaaaggacttgagggtggaaggtggtgaaaaagagaagaaaaaagtgcaaaggtggtgaaaatgttggaaaatcaacaggttcaaggtctcagcaggtttcatggattgttctagttgggggtactacagaggtgagctggaaagataggagatggtggatgaaagtgggatgcttattagtgggtgcagcgcaccagcatggcacatgtatacatatgtaactaacctgcacaatgtgcacatgtaccctaaaacttagagtataataaaaaaaaaaaaggttaattgaaaactagatgtttttctatctctatgctaatacagatgttttaaattattccagttgtttaataactcttagaaactttaatgataagtccctttctttttcttcaaattgtctaggctactcttgtcttttgatcctcctgaagaaattttacattcatcttgccaaataccttgaaaaacactgttagaagagcttacagagggctggcatgcacatggcaactttgtgcaggctgtaagaggcttctggccacttgttggtcagccagatatccaactttggtcacaagtgatgccacagtgtctcaaggagatgtactatcacaaatactgggtttgtgctctgcactaacatatgatacaaatattgatgaaaataatactgttgccttcctgaacaggaaattaattttatcactggatacagacacttatgaagaaagtggacttcaaggttgtccatttaaagaagagctgacaccaatgtttacagttgttgacaagcttgtaggactcatacaggactgttcacaaggccaaccagagagagaccctgcagaagaccctgggccagaactgggaggaacatgtctctttagtgacttggatggaagccagaattatgtatatatatagagagagtgacagggagggagggaaggggggagagagagagagagagagagagagtgtgtgtgtgtgtgtgtgtgtgtgtgtgtgtgtgtgtgtgtgagagagagagagagagaggttctgagagaggccaacatagaaatggccctggatatcaggtagcatggaccctttgttttgagaggccccagctaaattggggctccagtatcagagtggcaagcagccactgggcatgggtgtccacacgtgctttgcgtcggatacttcttttacctggtggatggcctaattcctagttgtctggactgtgaccaaggcgtccttcacgtgggaaacttatttatactgactgatgcctatagcttttgctgacctgtgtccagtttatgcctacctaaccattgctctggcctgggagcctgcccttatattctcctcagcatcccagggaaaaccaggcctgagtagcccctagttcttcagagggaaggtacaaattcaatataacatcacaataggaaataaattgaaagatttacaagccctgagcagggagggcacctttggaagccctttatcatcaggtcatatgaggctggaatgaagagtcaggcagagagagagacacacacacacacacacactgacagacacacacaccaaggggctacatggagcctcagcttcctagagaccccttactggactcctggacttggcctcagtggatggccaagaagctgctggctgtaccggccacccaacatttttgcattcactgcctggccactgacaactctactccctggtctcctggttgaggagctttgaggagttccatggaaagcatcacattgggcatcaagctgtgacaccagcagtggagcctggtcatggagagtgtggttcccttggacagtgaccattccacctgcacggtggagaacaagttttatagcatccagcagatgtatatgctgtacctgatggagactgccagccatccagagggtggtactggacagtgaggtagagtttcatttcaaggtgtactgagacttagcatgtagagatgaaaggcagcaaggtgggctctgaaggcacacgctacctcacagtgctcaagtagcatgtggcaaacttgtggggtttggggcaactccaggaggaaggcattatttcttgttctgataagtggtggtcaggtccagtttgcactcatgaaagttcagtctttgggatgtgcagttccatgggtctgaaccaatgtgctgtggctacttcactacttcagcacctcaggtagcagcttcttcatcctcaaggtcaccagtgtttctcctttgttgtcaaactctctccactctgtcagcccctggaaaccactgattttttcttagtccctatggtttagcctttttcaggatggcctatgaattggaaccatgcagtgggtagtttttgggtctggcttctttcacttagcaaaatgcagctaagcttcatttatattactgtaggttcaatggtgtcttcccttttatcacagttgtttatgggtgtaccaccatttctttattcattcccttgttgaagatcatcttggttgcttccaaagtttagtgattatgaataaagcagtgaatgtggcctgaaaaaaaaaaggaagaaaaacactgttagcaattttgtttgggattatatactaatttggaggagaactaacttctttttgatattgtcttcccatccaaggtaatccgtttaatttaggtcactgtctccagcttttgattacatttgttagttttcctcattaaggactttcgtgtcttttattcaacttttttatttctaaatatttagatgttttttgttgctactgtgctttgtattttttccctgattaaatgttctaaggatttttttttctgatgtttaaagggacttttaatttctgcatatttacctttgtccagcaactttgctgaacttaaaagcttttaatagtttggatattttcgtgtgttttatgtttaggcaatcatgtgatacgattttacttcttatatcttttatttcttttgtcatcttaatttattatacaactcagaaatctagaccaatgttgaattgaagcaatgatagcagaaatcctttctttccccctattaaagtaatgcatcaatctattccaattaagaatgatttcttttaaaattttattattattatactttaagttttggggtacatgtgcacaacgtgcaggtttgttacatatgtatacatgtgccatgttggtgtgctgcacccaataactcgtcatttagcattaggtatatctcccaatgctatccctcccccctccccccaccccacaacagtccccagtgtgtgatgtaccccttcctgtgtccatgtgttctcattgttcaattcccacctatgagtgagaacatgcggtatttggtttttttccttgcgatagtttgctgagaatgatgatttccagtttcatccatgtccctacaaaggacatgaactcatcattttttatggctgcatagtattccatggtgtatatgtgccacattttcttaatccagtctatcattgttggacatttgggttggttccaagtctttgctattgtgaatagtgccacaataaacatacgtgtgcatgtgtctttatagcagcatgatttataatcctttgggtatatacccagtaatgggatggctgggtcaaatggtatttctagttctccatccctgaggaatcgccacactgacttccacaatggttgaactagtttacagtcccaccaacagtgtaaaagtgttcctatttctccacatcctctccagcacctgttgtttcctgactttttaatgatagccattctaactggtgtgagatggtatctcattgtggttttgatttgcatttctctgatggtcagtgatgatgagcattttttcatgtgttttttggctgcataaatgaagaattggagaaaatttttgcaacctactcatctgacaaagggctaatatccagaatctacaatgaattcaaacaaatttacaagaaaaaaacaacctcatcaaaaagtgggcaaaggatatgaacagacacttctcaaaagaatgattcttactgtagattatttggtaggtaccctattactaaggtctttggcacccaaatctaagtgttggtatgttttcttttggactgttcagtttcactagggtggaacatttaatcctttgcctgcgggttaggcctggcagtcaaacgttctcagtgccaagacaagaagggcatttgtaatcttatcatgaaattatttctctgttttcactttggctcctcatccctgcccttcactgtgcttcttctcgtagataagagcctatctgaaatggcccttcctgggagtagatccatcttttgttaggcttgagaggctctgtgtaacagggaacaagtttcttagaatttaagacaaattgttgtttttcaatgcttttcatcattgggcttccataggtacttgatgcctccatttcaggtatttctgggtttctcctatgtgagtcagacacttcatattgccttcttaaccccacagactggctgctagttttcagctttttctgctctgttgagccagttaccactcatccatctgtgttccttcttccaaaactttcttgacatttctcctttcttcttctcttactttgtgtttgtatgtttattcctttttaaaattcctttttggggctttagggggaagtaaggataaataattggattgagtttctatgtttaactggaagtcctgatttatcttttcatccctttctttcataatttctatttcatctatgtcatcacatctaccacaaatagcatagaactggataaaaatctgattaaaaattcaatcttagaatctttgtttttttaatcagtgagtttaactcatttacatttattgagagtatggttatacttgaatttatttacattacattacttcatattttttaaataccttgtatttttcctacttttctctctttttctggtgtctattttattgagttttttatattccctgttttctcctctctattagtttagaaatcatagcttctatttccatggttttaggggttatacttaaatgttaaatcagtaagaaaaaacaaaccattccattaaaaagtgggctcaggacatgaatagacaattctcaaaagaagatatgcaaatggccaacaaacatatgaaaaaatgctcaacaccactaataatcagagaaatgtaaatcaaaaccacaatgcgttaccaccttactcctgaagaatggccataatgaaaaaatcaaaaaacagatgttggcatggatgcggtgaacagggaacacttctacactgctggtgggaatgtaaactagtatagcccctatggaaaacagtgtggagatacctcaaagaactaaaagtagaactaccatttgatccagcaatcccactactgggtatctacccagaggaaaataagtcattattcgagaaagatacttgcacacacgtttatagcaacacaattcacaatagcaaaattgtggaaccaacccaaatgcccatcaatcaacaagtggataaagaaactgtgatatttatatatttgggaatggaaaaccaaacatcgtatgttctcactgatatgtgggagctaagctttgagaatgcaaaggcataagaatgatacaatggactttagggactttgggggaagagtgggagggggtacaaagaataaaagactacaaatacagtgcagtgtatactgctcgggtgatgggtgcatcaaaatctcacgtatcaccaccaaagaacttactcatgtaaccaaataccacctgtacctcattaacttatggaaaaataaagaaaatttaaaaaatttacatactttattcaaccaaatttaaacttaaccaacgcccctacccttatcctgatcaaaacaagctccttagaatcattaaatctgattaccaattcttgattgccatcttctttttctttttcttttttttttctttttttttttgagacagagtctctctctattgtcacccaggctggagtgcagtggtgcagtggcacaatcttggctcactgcaacctgcatcttccgggttcaagcgattcccctgcctcactcagcctcccgagtagctgggattacaggcgcctgacaccatgcccagctaattttttgtatttgtagcagagatggggtttcgccatattagccaggatggtctccatctcctgacctcgtgacccgcctgcctcggcctccccaagtgctgggattacaggcatgagccaccgcatccggccgattgccatcttcttccatctttcaggattcttttgtcttatgtttagctatacatttttctctatacccaaatgagtcattattgattattattattattattattgtaactgtgtttttaacatttatttgctcacaattgcttcttgcatttagcatttttcttctgggttcagttgatctattactgaagaacatgatttagtagttatttcagtaaaagtctgtgtaatatattctctttagataactaaaaacgtatttttttttcacttttcattttgaaatcatggttagctgggtacagagttttaaggccatagctagctctttctacacattgaaggtattttccattttctctgatacccgttattgctttggaaaagtattctgattgttctttgtagttaatttctccccattttttttcctgtaagactgtctttttttatttttcagatttgttaaaatatatctaggcatggttttatttttatagttgttttatttatttatttgagacagagtctcactctattacctagaccgtagtgcagtggcacagtcatgactcactgcagccttaatttcccaggctcaagtgatcctcccacctcagcctcctgaaaagtcaggactacaggtgcacaccaccacgaccagttaattaatttttttttccatagagatggggtctctctatgttgcccagactggtttcaaactcctgggctcatgtgatcatcctgctttggcctcccaaagtattgggattatgagtgtgagccaccgtgcctggttatattttatgcttgcaagattaaaacaaaacatttttggtgtgaatttatttctatgttttatgcttacaggttttgtgcttctttaatctgaggagttatatttttcaattcttagaaattcctatcatcttctcaaatatcacctctgtatttttttgggatggggggaacctccagttttttgtaagttagatcttctcattctgctgcatgtttccacatgtctaatttaaaagaaaaatttgtctctggataattctttcttctctattttctataatatgaattctttcgatttaaccaatctgtgttttaactatctgttgagatttaatttcaatttgactcgttctttctccaaacttttcagctattttttttcctgagaatattctgttcttttgttatagtgtccatgtttttttcttagctctttattaaaaacatattttttcctaatctttctcagattattttactatctcaaattcttggtatgatacatattccagtttgttgtatctgctggctttctctaatagtggatttttttcctcacgtggtgtataatttttgaatgtgaatttattttcatcagggtttaaaaatggtttgcatgtgtgtgtatgtgttgtgtgcagcctacactacagttttgttttgcctatgcctaatgcccttgggatttttaggctatccgatcagcctggaactctggcatcacttgaatagtgtaactctagaactgctcaggcttgacattttaatttttttatgagaaaattctattttatttcactcaacattttgggaaaaaataaacttccttgatgcatccctaggccaaaacactgattatttaaatttttaacacagcagctaatattatcagtgtaagtaaaaaatttattagggaagctacttagcactaactgaagtgcgggagtccactgtgaattaatcttgcagatggtctttctgatcactgattctcaaggggttgtaaagcaggactagtgagagagaagcaaaacaagtgcatcctgagggtcttttaggggataatagctcctttgacatattctttagtggttccaagactaaattgtctttttttaagttcatttctgaaagtcagtaattgatgcgattcctttgagttttctggtttatattcccctctccttggaattgttctttctgtgaagatgccctgcctgtactgtatatgaccgacttcagttttcatatcaggtttcacctttttcttctttgctattttggtaatcatcagtgatgtattatccccaatggccagtctccatgtgtggtgtcttatctaatctaaatttctctaaatattatttaagcctcagaattccaagttacactgttctctcctctttctggtgttcattgttcttagagttagtaacacatcatttagcactttattatttcctgcttgtattgctcaagttacagtgaatgacttaaaatttggggtcatatgttgggggaatctttgtagtttagatcaatctaattcatgatattgtgagaaacaaatatttctcctttctgagacatatttcttaggctcctaggcatatacattgttcatatcaattgtcaaagtacaatctagctattttaaaaataaatggtggagggctatgaatattctttccctccttattaggactagaaatacaatttactaaatttgctctgctttccgccttgtttgttctttactaagcaaaatatattattggtagtatgtaaatgataaatgcaaacaaagtagctcttttaagttataaaactacatttgctgtcaagccagaggaatgagataatatgcctacattaatagaaagtatcactagtttttatgttttaaagtttctactttagaatttattgagattatctcagacagcattaaatgtgaggttttcaatgatggcttttttcctgatttttattgtggtcttttctaatatacctattagagaactgacatatttctactttttctcacaaataaaggacaatagcattatttaagtgctaacaggtatttatagagatgcatgcatgtttgtccagttcactttctttttctttattagacacagaatttgaagagaaatatagacattctagtcaaacaattaacatgtgagcagaatatattggtttttctttaaaaagtcagaatttcttccatattccctaaagtgtgttattaattctcttggcaagttacacagcagaatgaagtatttatgaatgtggctacttcttttaacaagttccaataactgcttcctaaaccttgtgtttttatatcaattacatacagtaagcactgaaatcaaccaaagagaactgcagaggccaacttgagatattctcattaaatgaggactgctgcctgccaaaagtaaaatgtggatataattttataacaccattttataattaaagtcataagtgaggtttcctgctattgttgaaaaatgtgtcatgataaatttaaatcaaagatacaggcaaagaaaggtctgcaaagtaacagatgaaggcaactcagatggtacagaaacaaggcctggtgcagaaaagaaacacatgcaaacaattttactgaaataattacatttattgtagatggatttctgttttagaaacgataaccacttagaaacggttttcattcatgtcagattgaggttaacttgttggtactgtctgtctatagaaagattcttttttaccagcagggaaatttaatacattgatttagtgataagaccatatcttctgaccaaacacccaccaaaaaaagttctctaaaactgaagaatgtgactgtaacatgtggaagtccacagtagttagcattgccagatttagcaaataaaaaatacaggacactcagttgaatttaaatttcagataagcaaggaatacttttttttagtataagtatgtaccaaatattacatgagacatacttatgctaaaaatatatttgtggcttacctgaaattcaaatataactgggtgttctgtatttcacctggcaaccttaatacagataaaatacaaattttggcaatgaattttgtatttttgaactaaatatttgaaagagaataaatacaactgatcagagcagagaacgaggtaaatttatttttgtactgtcagcctattaaatttctaacattcccagttatgtcaatgatgatttctgttcagtgatgaggaagatttttgccctgctgctggacccgctttgctggtgaacacagcccatttaaaagagcttctctccaaaggagacatgttgattcacatacatggatagatttaatcattgtgacattcctggctttagtaagtcatgttcgtctaatgtgaagcctgttcccaatgtatcaattcattcatcttgtctctaatacaagccatgtgtttcatatgggagttgaaaggacattaatcagaatctccccctcaaccagtccaaggggatgcaaagtctgtggttacatctcaaatgtcaagatatggggaaatggaaataacattcaaagcatctcacttgtaatccataccgttgttacaattgctatgaaatatgttggggacgggaaggcagtgtaccataaagcagtgtctgttcagtggaaactggttggaaggggttgaaggagctgtatctgcttttccgcagcagacacaactcccatggaatctatgagaaggcagaaattggtatccaaacttttgttgcgttcctttaagagtaggggaaatgtatagtcatctatacctcaattttcctgttataggtcagtggttctccatcttggctgcacataggaaccacctggcaatttgtagcactcccaatgccaaggtcacacccaagaccaattaaattataatctttggggtgggaacccaggcatcagttgttatcaaaactccccaggtggtgccaatatgcagccatatgtaagaaccgctggatcaacaggaaattctggctatagacttgggaatacctactgacttattgtcatctatggcatttgtttcttaccaatttaccgtgttatatctggcatctactctttatttaaaaaactgctggttcatcatcatcagcatcatatcattatgataatctcttatgctcttggaggaaaaatgacggtaaataattaaacaacttgtaataagatgttaaaatgtaaaatgaatgaaatgcaccaggtgctgagttaggtggtcacagagggccttctctatagaggacatttaagtagaaatataaaaccatggttctcaaagtgcagtccctacggtggttctcaaactgtggccctaggaccagcagcctcaaagtcacctggaaacttggtcaaaatgcaaattctgaggccctaactcagcatttctgaatcagaaacttgggggttgtgtctcggatacctgtattctaaaataagatctccgaggtgattctaatgcataatcgagtttgaggctataaatatttttccaaatattgatttacagtattctacaggaatttctatgtgttttcacttatttaaaataatatgtagtttcaattttaatctgtcttaagattaatacagatacatgttctaaaattccaagttggatttttttttattgttgatttccagttttttttttaattgcatttagataacatgacacgggtgatctttagtttttgggtttaactgaacatttccttggggccatccagaccaattttgcaatgtttcataggttttttatttatttattttattattattattttgaggccgtcttgctctgtcgcctagactggagtgcagtggtgtgatctccgctgactgcaacctcggcctcccaggttcaagagattctcatgtctcacccactggagtagctgggattacaggtgtgtgccagcacgactggctaatttcattttattttatttttgtagggatggggttttgtcatgttggccaggctgatcctgaactcctggcctcaagggatccacccaccttggcctctcaaagtgctgggattacaggcatgaaccaccacacctggtgtttcataggtttttgaagagtatgtgtatttgtatctattaattcaggcttgcaaattcagttatttatttattgtgtgcttgatctatttctgaatatggagaagtgaaagactcccattttgtctgtggtttgccaattgttctttgactttccaacatttttgttttgtatattttgaaactacgcccttacataaaaatttatgactgttatatcttctggataattttattagcatacactgcactttattagcttatattattctacactagtgttgttttttccattgattctctttcatgtgacatttaatttgctttacatatcctttttcatatttcgtttcacatctttggtgtgtctctaaaaacatcagacagtaggtattctttagctttgttaattttaatacaatttgtaagtctctgtgtttttaacaccagaaacaaaccattcatattaactgttttttgagattttaaaactgtcaccttatttttgtttactacctttgaaatgttttatttttttctgacttttgacctgactatactttttgtgtgtgtactctgtctttaaactgctagtaattttttggaaataatatatctgaaataattttaaaacttgtctgtaagttctttgacatttcccagtgagagatggagtctgaatcctttcctcttgaacgtgggccaaccttaatgactcacttctaacagagaatgtggtagaagtgatatgaatagcttccaaagtgggttcactaaaggcattacatattcttctgcctggtgcatgctcgctctcattctctctctctctctctttctttctctctcttcctctctctgttaagatactttccattggaacccagccaccatgctttcaggaagcccaagcttcatggaaaggccatgtctaggtgttccgggtaacagcttctgctgaggtaccagtggaaagtcagcatcagttgctgaatgtgtaagtggaggctttatgcctagttgtgcccagttattccccaaatcctgagcaatgagaaaatgattcttgttgttttaagttacagcaatagatactgaagaaaaattttatttttattcttctattgttaaagtaatttcaaacatttatataaatataacatcaaacattaatcaatagttataacctgtaatcagaacaaggcaatatttttaacaaaaaaaagagtgagagaaaggagggataagagaaaaggagagaagagagggcacaaaactaaaagtagcacaccaatgaacctccggtctactcattggcaaagagcaagaatgagtattatgaatttgcaatgtgtcactcagagttgagcatctcatcaggctgaatgtgattataacatttaaagatatgttattttctgtatattgtgcactctcaaggcaagtcaagaactttatttggtgctcaagtgaaaaattaagatccattccaatgctggagagaaagctgtctcaagaggcagcatctttatagtcttacggtgattgaagacatttttaaggtcaatgatgacgccagtcaatttttgccttgcataataacctttatggcaacccccttgggagcatgtccgaccacatgggggtggctgttttttaagctcctgcaggcttgctcccttccctgtttgtgttctctgccttgttaactcagagcttggagattctttgggggctgtttggggaagaagttactttacctatataaactcctatgcaaggtctattgtagggtgagatttttctctgttctgttttctatgttagtcttttttgttccttcttccttccttccttccttcctctctctttcttctttcttttcttttcttcttttcttttctttctttctctctctctctccccctccctcccttccttccttcttccttccttcctctctctctttccttccttccttcctctctctttctttccttccttccttcctctctctctttccttccttccttccttccttcctccttccctccctccctccctccctccctccctccctccctcccttccttccttccttccttccttccttccttccttccttccttccttccttcctaccttccttccttccttcgtcttgctctgtcacccagtctggagtgcagtggtgccatcacggcttactgcagccttgcctcctgggctcaagcaatcctcccatctcagcctcctgagtagctgggaccacagtcatatgccaccatgcctggttaattttttaatttttagtagaggtggggtctcgctgtgttgcccagtctgggcttgaactcctgggcttttacattaatctaattccatctgtctacattaaaataattcttgtttttgaaactgcctattaatccgttctccttgtaaaaatttcaaaccatagaaaattgtaagaaagatcttctttgtccaatctagaatagatctcaatccctttctttctcatcactctgttaaatttctattcaaatgtattttttagaacttgattgttgttgcccgtacatgtatacgtgcataatttgtacatgtgtgtcttagctatccaatggtctttttgctgtttttacaaacaacaccaaactgcgtggctcaaaacaacatttattttatatctcatggttctatgggttggctgaggagtaggaggtcagttcttctaccagccttgcttagacttcatggatgaaaatgtctacaacaatattctccattctacatgctcatcaagagtctttccatgcctggatcaaatggttgaatccttctcttgagctgggtgggccattgtgaatggctgaactgatagagtatggcagaagagatgctatgtgaatttgagagtagtttataaaagatgctgctgcttcccctggctctcttttgggacacttgcatttggaacccagacaccatgtcttgaagaaacccaggccagatgaaccctcagacctggctgagattccagctgatagccagcaccaacttgatacccaaataagtgagccagcttggatgtgaatccttcattcctcagtcaagtttactccagctgatgccataagcagcatcacatggagatgccaggctctgcccaaattgaagattcataagcaaaataatgttattgttttgagtcactatgttctgggatagtttgttatgcagcagtagggtagactgtcttatgcagttgcagtcagaaggtggtgtggagttggatatatgataccttagtattcttccatagggcctgtcattccagaatgggagcccgctcacctcttgtggcagctcaaagcttcataaaaaaggaagtgagaacttccagccctttttgatgcctgagtttgtgcatcctggaatgtcactttgtccagatttcaggggaggaaacataagctctaccttctgatgggaggaacaaggaatgacatgtgtatactgaaagggaagggattgacagtggccatctctggaaatcagctgacacactgccccttattaaaatatgaggtccatgagggccctaaccttgtctcctctgttcaccattgcatctccagcacctattgctgtatttgacacatgctatctgtgaaaatgttgcaaaaacgactaaataatatagtgcaagagtgaaagggtacaacttttgtataagactatttcctttgaccagagtactttctcctctttccctaagctatctctcattccttctcaaaactcagtttaaatgccatttccttcatggcccatgcagagttagttactctctccttttggctcccttagtattttgctcatgtctcgttgtgttgggcatttgtcggtttctctttgggaggatctcaaaatgcaaaaatcatatcttagtcatgtctttgaatgacttccagtgtctggcaggtagtgtgctcagaaatatagccatggcttagaacaaacactcaaaaacggaatcagtgaattctaactctgggctccacaactcaacagggaaattaaaaaaatttgaagtacattttaagaacagctgatgacttaaaaggccttgggtggcgttgaagatgcatggcaacagaaaaaatgttagtctagaaaagggaaatgatttccaaagaaaaatactgagatcactgaaattttaaaaatacttctataaacttcaacaatagaaatatctgctctgtacttcatctgtgaaatgggggataatagtcctgatgagtatttaaggttgatgtaaggagtgaatgaaataaaaaatatacatagtgctcagaccaatgcctggaacacagttagtgttcaataaggagtagctatcataataaacctttaaacaatgtctgccacttattgactgaccacttgtgcaggaactgtattcagtgataatatggatgtcaaatgatgggtgtttctttatgaaagtaattcagcatgaagcaagaaaggaggagtagcctttcctgaaacatcaacaaggttgaatgtcatttccaggatctctttcctatcatttttcaatgtcacttttcaatggctagcatcttcacaatgcaagattggaaggaagagcagggaaaatggagatttgctgattctacaatttggtgaacaggtgtggaaagcttggtacatgctcagctgtcacttagaagagtagagaaatcaggccacaagcaagtggctcacacctgtaatcctagcactttgggaggcttgggtgggatgactgcatgagctcagaagttcaagaccagcctgggcaacatagcgagaccttgtctctacaaaaataaaaataaaaattagctggatgtggtggtgtatgcctgtagtcccagctattcaagtggttgaggcaggaggattgcttgagcccaggaatttgaggctgcaatgaactgagatagtgccactgtactctagcctggatgacagagagagaccctgtctcaaaaagaagcagcagcagcacagagaaactgacatctgaaaagaaatctccaggcctaagatttctagctcttgaacatttgaagcttgctttatatagcaattcctttccatccatttatagagtgaaaaatcaggttgaagcttgctttatatagcaattcctttccatccatttatagagtgaaaaatcaggttgttttatcaccaattagccttccaatgagagttactctgaatagagaaatggcagagacccagcttaactaccttggagatgctgataaaggatccagcacatatgtctcaggggcagcctctcatgcaatctctacaactaaccatcaacgtttcttggagaatccatcatcaactgaaattgctttgtttgatagcttaggcagccagttcaagggcagactgcccagacagacctctgtgctagctgccaggtaattaatttacctccaaaaatgaaaataaggctcattgttctcactgcttcttttcttctttcttttttttttttcttaaaataaatcctgtttttacctttcttcattgacgacagcctaatgacaatctcctttatatacaagtaaattttttggcatgcagataagtaactgtacatctctgtgtcattctttgacatatgacatcacggagattcactgtcatcttatatgcagtcttttagctgatcagtgaatgatctgttttgtttttttggatacaaattttatttttggagcctagctttataacaaagaaatgaaaaagttgccttgttgaaataggatggctcattgtacaagtggtccctggagactctttgacttgaatacacagatatgaaaatacatggagatgtgttggctaaagatacaattaaatgttttaatgagtgctgttcagttaatatgtaacggaaggaatgttaattattttctgagatctctagggcatctgagatctctgagattctcaactgggggacagttttgccctccaagcggcttttggtaatggtttggagatatttttggttgtcacaatgggttggggcagttgagtgctactgttatctagtgggtagacaccagggatgcaggtaaacaccctacaatgcacatctactcacgacaaagaattatctgacccaaaattttagcagtgtcaaggttgagaaaccctgctctagggctacaagtcctgttgatagtcaccctagattgcattaattagtttaaatgtactttttattattctttgatgtattatagtcttctacacttctctaagccagtatgaaacataaggtccagcatatattattattcaaatgtttcttgcttgaataaatacatgattgtcagtgaacatctgttgaatgaacaaaggggttacatttaacagctaattgcagtgtttatgctacttaaacatggtggctttttaggtgttcttgtctcagtttttgagagctttgctccttcttcactgggatttagacatgtagttataaggagttaaattctacagaggtgtgcaaagatgataagctacaggcagcagggcggtaattaatatttctctgcttggatactgagatttccacacctgctggataacagtgaattcataagggattatatacttaatggtaacatttatatataacaaacatttatttaaaaaactcatatgaattaactaatctctagaacgttcctatatgggatcctctatcagtctttgtatttataagcatttattgaacaccttttgtataccaagaaccagttatttcccaaaactttggtgagaccaacagactttatatcattagctagtgagtttttctaaaagtgttggcttacttataaccagtgagttgtatctcttttgtggcattggccagattttataaactgtagcttcttgtttatttataatggacttagatccttggatgagatgtattacatatgtgtgaaggattagagggcactttttaataacaacaggaataatactgctttgtgctgctaaactgtagatcttttcttctaaagatttaaagcccattatagacataatttgattgttgctgtattgcaacagtgtttttccttctctcctcatccaggcagatttttttcttgattaaagatggcatgaatactttctcatgttatgacctatttgataaacagctcaggatgttacaaaagcaaagcaggagatgtcttaaataattagtggcagaaagcttgctgctgctcgggtgttaatcttgccagaaagctcagatatttgtgggttgcactgtaaatttctgtacagatgtgtgtgaggttgagtttcagccatacgcctgtaacagcatcaggaaacattttgtcatgctacttccttgggtgatcttctatgaccaaaagaaaaaaaaagtcatatttctgtcttgtgaaattgagctcgaattctgggtagtttagtagtaatcagtatatgcctgaatcacagctgcgcgggatggtttgtattatataccaatggcaactactgctttaaatatggaaattaaatactttaggttcaggctgattccaatctgcgggtaggaaacgtctgatctatcccaagataagtttaaaagtgtgtggagttttctctggggctacaaatcctgttcacattcatatgtatttcttttgagacagtcccttgaggtctcttggcagccaccttcttgaacgtgggaagagattgggatccctaggaatgcaaaaaaggagaaatcaaaatgtcctcagaaaattccagggtgtggttggtccagagacccaatccaacagttccaagactcaaaagatgagtatcaaactatacttggcttccctctcttcaggcatgagacatccacatttacccagaatcagttcctaatttggaagcttcttgtgttcccagcattctcagatcttgtaccaaattttttgtaaactctcctaataatgagtagttatgtatagcattatagttgtggtcttgatgcttctattatcagttgatcattctggctctgtttctttgtggctctgtggccatgaaacaacactttaataggtacaagatgactggtgaaactcacctagtaagctctgggctttccttaatgtgtataattagtgtatattatagctcacttaaaaatgtgttaacgggtgaaattaacatgatacctcagaagttgttgattatttatttatttttttgagacagggtctcactctgtcatccaggctgcagtgcagtggtgtgatcatggctcactgcagccttgacctccccaggctcaggtgatcctcccagcctcttgagtagctggttccacaggcatgcgccaccacatgtggctaatttttgtattttttgtagagacagggtctcatcatgttgcccaggagggtcttgaactcctgggctcaagcaatccacctgccttggcctcctaaggtgctgggattacaaacatgagccattgtgcctggaaagaagttatctattattatcttgctagacaatctgtctgtgacctcctaaatacctaacagaatatgctgagccctgcccttacccctccatctattttggaggtcacctgtaatgttggtggatgctttcagtcacaccaacagcttcccacctcaggcatttgtgtccctctgtctgagggctttcattggtctgagggctctctcagcctggctcggggcaggtcacaagtgctggggaatcagcgctttcccaattgaccctcaactattgagggatgagagttggtgggtgtgtaccaggcttcctcatccctgggtcagttctgtattctacatagtatccgagagggtcccagtgggattgagcccctatgcccacagggatgtgctgctcaccaacattccctttccttattccttctctgacctgttccactgctcccttgtgcttcctgttttcacctcccaattcttgtctcaggatctgttgctggggtaactcaaaccaaggcaacatctcctatgatagcccaccaggccgcctcccccgctttgcatcttgcattcagtgaattactaagcgctttggctctgcttcctaaataaccctccaattatcttcctctctatttctagagcttagttcatatctttactatctcccttagttgattacaatggcattccaatgggtctctgcatttcagcctgttttcccatgatgggtcttccatgatgctgctggagattcctttccaaaaggcaaaccatatcctgttacttcccagcttcaaacctttcatggctcaggtctttcatcatctggcccttttctacccatcctgtgcctttcctgagcaccgcactgctgtgtgccttccaagactgtagcatgtggggtttagatgctgcttttgcccacccgtgaacttcagcacaattcttttttcttttcttttttcttttcttttcttctttccttctttctttctttctttctctttctttctttttctttctttctctctttcttgctttctctttctttctgtcttcttttcctttctttctttttctttctttctcaactgtacagtacattgttattaactatagttaccatgttgtatagtagatctcttgaatttattcgaactgaatttattctgtctaactgaaattttgtatcctttggcatctcctccattgcccctacttcctaggccccagtaagcatccttctactctctgattccaagagtttgacacttttagatttcacatattagggggatgatgcgatatttggctttctgtgcttaccttaattcacttaatgtcctccaggttcatctatattgttgtaaatgacaggatttccttcttttttaaggcagaatactagtccattgtgtatatataccacatttttctttgttcatccatcaatggacacaggttaactccatatttaggctattgtcaaaagagctgcagtaaacatgggagtgcagatatctcttcaacatgctgatttcatttcctttggatatatacccagaattgggattgctggattgcatggtagttctatttttattttttgaggaatctctatactactttccataatggctacactaatctacatttctaccagcagtgtacaagggttcccttttctctgcattcttgccaacacttgttatcttttgtctttttgataatagccattctaacaggtgacatcccgttgtggttttgatgtgcatttccacgataattagtgaagtttaacattttttcatatagctgttggccatttagaagtcttcctttgagaagtgtctactcaggttctttgtccattttaaaattgggtggttttcttgctactgagtttttgagcagcataattttagagacgacataaacttcaccttatatctggaactattttttgctgaccataccctagcagtggcttcctcagtcccactgcccctagccatgtgctcatattcttattggccctgtacatatctccatgtatggctttattcttatgtatcagtgtgtgaatatgtaggcctttatcgctcaactctgagttccttgagagcagtaaccacatgtgattcccagctcctggctcagtaccaggcctgaaatcaatacttgatccttgaagaacagttggacattgcattgtgcttcagaagtttgctctggaaaatatggtagcactaagggttgggaggaggctctctattctgctaacacatagattggcttaatgaagagagacaaattaatgatgatggttgcatgacccagaggtttagtggcagaaagtgattaaaatcctcactaaatattttatatcttactccagtgcttacttgttagacctacctattctgtcatgtttaatttcttttgcttatacttctaagcccttgctgaacaggtaggagggaatagaggtaaatttgcagaaaactccagttctctgggggtatagtttgcttccgcaccagatttgttttgttaagacccagagagtcactgaggtcaagtgaaataaaaattataaaataaaaaatgttcagtcctttacaatcttggtttcaatttctattggctagttgcacctctatgggaaacaacatatggactagctaaaatgcccagctctgttccttccaagggaggacttgtggggaggactctgttttcttagtgctatgacttggttatgggctttggctcctttccctatggaaagttctttattctggaaaccagattccaatctcctgtcccagggaaggggtggggcaggcattcatcatagtttatacatggtctacaatggggagtcaattctagctctgtgatgctactctccataacttcagtatcatcccatataatttcctagtgtcagggcgatctggtgtaacagagaaagtgtggcactttgtggaggtccccatggaaactccatggatgtgtataagggctaaggggcagagtcaccatgcagggttgagatcaactgtgttcatcagagctacctcctagctgcattgaaacatagtcacacttgtggtggtggctgggacatgtctcctggcaggatgggaagtgagttgttcccagccttacaaggggctgggaaattctttttaattgagtagagccctgaggactttgtgatgagatataggcgtaccctgcaatacaaataaagccacaggtgtgggtctaccccgaggaatggagacaggagacactggccaagatgaggcagagaggaggcagggaagccactgcccatatgtaatgtgcaggggtccagttcccacacacactgagaggccttgtttcctgcctgagttcccagcaaagcagccctctctgacccggcctggggtttcgccctcttggtattggtttcctcactctttccatggggagcccgtgtactgtgtcctctcatgttctttctcaccttgctcaggcccatccgagcttggaaagtggtgagttgcaacctctgcattccatctctgctctcaaatgaggtctatttattaaaaacaaaaggcagaaataaaattattccatcaacgattacaacactcctgattattttgcttcattttgagacatattgaaggatcagataattccattttgacaaaaataattgtaatagcttatatttaaaaaatattttttatgtggctcagtcctatgtgaagcactttgtttttatcattttgtttaatcctcgtgacacttctctaaggaaggtattagcattaattccattttatagacaaggaagcataggaacagagaaagtcaacaaattgcccaaggtcacactgtcagtggaaaagctgggctggcagctccccagaagtgttaaaaatacttcctatcattcactccttgcttaaatgaacataaagaatgtagatgcaaaagaaaaagaaaaaaccccgaatcaaatataaaagagagactcaaaattaaaaacaataacgtggatacagacattttgtagcatcgggagacacacagtgatgcagcagcactgctgagagggcacgctttccttcttgcaaaggacagtggacaaaggtgtccatatttatttatttattttaaagagacagggtctcaccttgttgccaaggctggggcacagttgcaagatcagagctcactgcagcctcgaactcctgggatcaagaaatcctcccacttcagcctcctgagcagataggatatcaggttggcaccatcacactcagctaatttttttttttttaaattatactttaagtttcaggatatatgtgcagaacgtgcaggtttgttacataggtatacatgtgccatggtggtttgctgtacccatcaacctgtcatctacattaggtatttgtcctaatgctctccctcccctagtccaccatctccccaaactggccccggtgtgtgatgttcccctccctgtgtccatgtgttctcattgttcaactcccacttatgtgtgagaacatgtggtgtttggttttctgttcctgtgtttgctgagtatgatggtttccagcttcatccatgtccctgcaaaggacatgaactcatccttttttatggctgcatagtattccacggtgtatatatgccatattttctttatccagtatatcattgaggggcatttgggttggttccaaatctttgctattgtgaacagtgctgcagtaaacatacgtgtgcatgtgtctttatagtagaatgatttataatcctttgggtatatacccagtaatgggattgccaggtcaaatggtatttctggatctagatccttgaggaattggcacattgtcttccacaatggttgaactaacttacacccccatcaacagtgtaaaagcattcttatgtctctacatcctctccagcatctgttgtttcctgactttttagttgtttttagtttaactttagagacagggtcttgctatgttgcccgggctggtcttgagctcctgacctcaagcaatcctcctgccttggcctccaaaagtgctgggattacaggcatgagccactgtgcacaacctgcttctttagactttactgcccgtgaaggatgcagagcctgtggttttccctgtaggaagcatctgcattttaacagaggcaaatgctttaatctagcggtgggagttctggtcgatgacctgctggagaaatccatgtcagctgtcagctcctggaggccatagcttctttgcagttgttgggtactgtgcttagagtagaactgtgagcaatcaggggctattcagtgattaaatgtatttgggtcagagaggttttctgtctggcagtctatcaactccattgcatggacacttgcttcccctgcttgtttcaaacagatacctcctttcctgttgccacacctgccctgtcaccagccctgccagcctacttctttaattactctccaagcgggacccccctccacgtctcgtgtctctaccagagccttcatcacctttcatagagaccctagctagtcctcccacctccaagctagcccaaaggttttcaaactctagcatgattcggagtcacccggaggatttgttaatacagattgctgggccacgcccccagagtttctgacttattaggtcccaggtgggacaagaatttgcatttccagcaaacttccaagtgatgctgatgctgctgttccagggcccacacactaaagatcgctggtgtagcctaatgatcttcctaaaacacaaatctaaccttgacattctcctcctaaaacctgccaatagcttatctgagtctttcggatgaagtctggactcctcagggccccactcaaggaccttcacagtcggctccctgtgtacagccccagctccatcactgaggtctttgcttggcccacagtgcctgcagttctcccagtggaccaggctttgcctcacctctgggagtcctgcctgctgcattcttctctcctttccttgcgggctgtctttcccaggctcttgtgcagctggtttcaagctgggttgaaccaatggaaggtactggtaggatatgggaaggcagtaggagggagaaagcaggtataattatttcttctctctgctttgagtagcatctgtagtagtggctgtgtttcctgtatagcttcagcttccatcacacagacctgctatgttttcaggttccacaagatcaccccagccatgggcactggaaacaccacctcctctcgaggtccctgctgtcctaggggtagaagtagctttctgctgttctcagtgcctgggtgttcctctggccctgtttggcttcttaactcatttgtaatcaatatcatacacacaattcgtctctggggtaaacacataaaggttaaactgctgatgtccaatagaactctccatcatgatggccattttctgtatctgaggtgtccaaaacagtacccactggctacatgtgaccattgagcacttgaaatgtggctagtgccgctgagaacctgaattttaactttcatttaaatcaaattaaatttaaatagccacatggggctagtgcctactatataggatagtgcaggcttagtctctgcctaatatacagcctctgaaatttaggaatagattctgaaattggcatcaaaatgatagagaggtattctgtgctctgtgccgtccagcacagtcttgctatctgcatataattaatgactttcaaaacttttaaatcattttataaaatatagatctacaagggctgagattacagaaaggaagaaagattaacaagaattattgttaggtaaattaaagcaagttatagaacaatacgtatcgtaccatttgatttggtgaaaatgaaactaagtaaaactgtgagtcctcatgtgaaaatgtcttaagggatacacaaaacactgttaatggtgggaattagaagaggagggaggaggaaaagaactatttttcacttaatacattttatatttctctgtgttgtctggacacacacacacacacacacacataaacacaaacacacacgtggaggtatatttttccataagcacatatcacttctactgttgtatatctttctctatcaattctttaaaacctatatgtctttatatttaaagtgggcttcttgtagcaacatataattgggtcttgtttttttatcttctctgaccatcactgtctttcaattattgcatttagaccattgatgttcaaagtgattattgatatagttagattagattcacatctactacattcgttactgttttctatctgttgcccttgttctttgttcctatttttgttttccactctttttcttccttttgtggttttattgagcgttttatatgattctattttctctcctttcttagcacatcagttatactgctttttttcttttcttttcttttctttttttttcttttgacggagtctcgctctgtcacccaggctggagtgcagtggtgagatctcggctcactgcaacctctgccttccaggttcaagcgattctcctgctttagcctccagagtagctgggattacaggtgcgtgccaccacgctcggctaatgttttgtatttttagtaaagatgaggtttcaccatgtgagccaggatggtctcaatctcctgatctcgtgatccacccgcctcggcctgccagagtgttgggaatacaggcatgagccaatgagcctggtcctatactggttgtttaaaaaaaacattttttagtggttgacctagagtttgtaatacacatttacagctaatccaaggcccctttcaaatgacaccatgccacttcacaggtagtgtgagtaccttataagaacaaaatatcctcaatccatccctctagtcccttgtatcactgccatcattcatttcagttacacctaagcatatataaatatacagagtcaccccttgaacaaacaggtttgaactgttttcttctgcctctgtaacccctgagacagcagagccacccactcttcttcctcctcttcctcagcctattcaaagtgaagatgatgcaggtgaagacctttctaatgatccacttctacttaatgaatagtaaatacattttctcttacttatgattttcttaatatttttttctagcttactttattgtaagaatatagtatataatatatataacatacaaaatatgtgttgactgtttatgctattggtatggcttctagtcaatagtaggctattagtagttaagctttttgaaagtcaaaagttatacatggaggctgggcacagtggctcatgcctgtaatcccagcactttgggaggcagaggcaggtggatcacttgaggtcaggagttcgagacaagcctggccaacatagtgaaactctgtttctactaaaaatacaaaaattagctgggtgtggtggcaggtgcctgtaatcccagctacttgggaggctgaggcaggagaatcgcttgaacctcggaggcagaggttgcagtgagccaagatcatgccactgcactccagcctgggtgatagagtgggagtccatctccaaaaataaaaaaagtcatacatggatttccaattgcatagaggtgagcactcctaatccccaaattgtttaagggtcaactgtatgtgtgtatatacacatatacccatacacatatacattcataaaatactatatattgctattatctttaccaagtattatctgttagatcaattaaaattaagaaaaatttttcttttacctttacttattccttctccaatgctcctctttatgtagttctgtgtttttggcctatattgttttccttctctcaagagaatttcttttagtatttcctgaaaggcaggtcgactggcaacaaattcctttaatttttgtttgtctgagaaaatcttttatttctcctttgcttttgaagtatacctttacagggtacagaattctaggttggaaatatttttctctcaacactttaaatatttcactttactcatcttgcttgcatggtttctgaagagaagctggaaattgttatttgtgctcctctgtaggtaaggtttcttttccctctggcttctttcagcatatttttaaaaaatcttcaattttctctacttgaatatagtatgcctagatgtagtttttattgtttacatatttatttatttatttggtatttatcttgcttggtgttctgagctgcccctctgggttttggtatctgacattaatttatggaattacatactgatatggtttggatccgtgtctccacccaaatctcatgtcaaatcgtaatccccaatgttggaggtggggcctggtgggaggtgattgggtcatgagggtgtttttcatgaatggtttactgtcatccctttggtgctgtcctcacaatagtgagtgagttcttgcaagacctgcttgtttaaaagtgtgtagcattcccctgcctcttgctcctgcccccatcatgccgatgccttgctcccccctttgccttccaccatgattgtaagcttcctgaggtctccccagaagcagaagctgctatgcttcccatatagcctatggaaccataagccaattcaagctcttttctttataaattaccctgtctgaggtatttccttatagcagtgtgagaatggattaatacatatacctttgacttttgtcatttagattccactgaacaggatttagtcattttcttggtgctgttttaatcagacatggtaagacacccagccatagaatgactgttataaaagaagaggtttttatagtcacagatctctagtaacaggaggcacagcacgtcctgcagggccatatgggaagcaccagggctgatcggggagcaaaggaagcaggaagaggatatcttggacaagagcctttattgtggtttctgtgggaaggaacaggcaagataggtaagcaggtttaggattggtgggtttgaatagtttcagtgagctctggggcatatggactgtccctagttacctggtccccagccctggggtgatgagggcagggaagcagtggctcacctttgagagtcccattaagaggtggttggagtgggggctctggattgtttgatttgcatatggaaaacgtgctcctaggcaaattatttgccatctttaggaactgattagccctgggaggagcagtttttccagggttagcaagacctcagatctctaataatcagaaatatagaaaataaaaaggcatgattaatacatatgatgaagccttcaggaaggcaggtaagacactgtttctgttagctgaaatttctatgatctttgagttctgctctctgcttctcaggatgtcagggatccctccttttgctctgtgtgggtttgcatctggcctgttttcttctttctcttttaaatttgttagacttataatagatgtcaactaagagtaaataggcgctaactgagggcctcaggtgtttgctcctctgttaatgctcattatggcatttctggtggaatatcaatttttttaaaagtgatcactctttaccactgtaagggtagattatatctgaggtcatggaatctcattagaagccaagggaccactcagtgcaggagttcatgcagtgtagctgtcccagcaaccctaagctactgttgcctttctctacaccaagcttaaaacctgccatgggccaagtgctttgctttcagcacccagttttacaggctgcattgctgctcagggaaaacttactgcaaacaaactaagcccaaaataggaaacgcttaagatatttaaggccttccttattcttgagccaaccttagcagcaacaaggccacatccccatctctggggtccccagcgtcttagaacaatatgtccacctctagattgtaaggatcctggaaagctcatgtattgtgtttctttctttctttgtcttagctgtatactgtatttttgaggccatggcttctggataaatatggtcactattttatggagcacctattttcacacagtttagtgcaaaaaatggcgccaaacaagccaatgaacatagcagcatgattctggttgctgtctaacttgggcaagttactcaatcttctcgtgcctgtttcttcaattataaagttggaaaaataatgggacttatctcctagggtagctatgaaggttaaataactgagtctttacagagtcaatacattgataagttgaggcaaatatgtgatatttaaagctataaaggaattgtaaaacaaggagtgaatttagtatagcctatataaaatctcatgaaattttgagaattttttccctggaaaaaacaaaacaaaacaaaacacccctaagaggatgctttcctctgttccctagaggttcatgtcagcatttcatgttggatgtatttcatggagtgtgtatttgattctactgtttgctgattctgctgtccccttgctgttctagaggaagcctcaaactttaacaatctattcaatgtaggtaggttaacgcagatagctgtcaatcccatactgagatcgggtacctgagagcaatatcccatggactaagggccccaaacatgagggagcattgggatggacaccgattctatgtcaccttccctgctcttctctcctgacacctgggtgtcttcaagctgtctactgacttaggcctaaccttcttaccataacctgggcctgaagacttattatccctgacttttccccacagtggaatgggtttattgctttctaattggacaatgagaaaggggaattcaatatatagaatttctacagctaattataaacatttctaatgggatatacaagaagtctcttataagccttgttcatcattaccaaaccctagagacaatccgaatacctatcaacaggggaatagataaagaaattatgctgtatccatccagtggaatactacttagcaatggaaaggagcaaaccaacatacacagcagcatggatgggaataaaaagcatattgttgagcaaaatgagccagacagaaaagaatatatactgtgggattccatttatatgaaaatttgttatagtgacagaaatcagaacagaagttgtctcttgggggatgattcaaaggaaaggtgaaggaaaagtgctgtcttaatgtgaatgatgtttacatgagttaaatggttacttcattgaactgtagtctaaaggtttgtgcatgctactgtgtgtaaatcgtacctcaataagtactgttagcatgctaaaaacatttctgatgggaaaagttgctcccctttctccgtatcctcgtcaacatctgttgttttctgactttttattaatagccattctgggcaacaatagaaactgaggacttctggagaggggaaggagggaggcaggcaagagttgaaaggctagctgttgggtatagatgctcagtacctaggtgacaggatcttttataccccgaacctcagcactatgcaatatacccaggtagcaaacctatacacgcacttactgaatctaaaacaacagttgaaaaaaagaaagccctctccaaccaaccaaccaaacaaccaaccaaatatataaataaatacctcaaatgaatcctaatttccatgttttaaatttgttttgaccacttgtgtttggtccaagcaagtcaaggcaaataggcacggagcttcttgccaagattatattctaaataagataatagtcttaaagaaagacacactgtaaaactcatgcaatcctcaaaaagctgtatggtataataaaaatgagataaccaccagaaaatcactatcagctattaacaggacaattgtaagtctcttgtgtcaaagaaagtttcatagagaagcgattttaggactcttttgcctctagctataaaaagtgcttggcaaatcatagggaataaatgcttttccaccctaaaatttttaacttgcagcaatgcctgcaatctccccattagagaatgatagttttggcatttaaaggtctctcagttttcaagatcccttggcaccaagctctcaacacagacccattatggtgtgaagctttagtgagggggtgactggtctggaatgaaacgctgaacaggcttttgacagatagcagggatctcagatgctagaagatacagaaaagggaagaaggtcattaaagataaacttcactctgtgctcaattttcccagggctgatccttctaatgcacattacctcatttattcttacctttggtttatcttgaatgtcttcttggggacctatttagggctagggcaaagacagtcaagcacttttgtggaaccaaatgtatataactgacttttttcagagatcaaatttcagtgctgaaatcttgggaaatctatgtaaaatctatagccaatcatgaatagccttaaggctaagagctctttcttgattagcatcacgctggacaaatattaaatgttttataaaagcatttttctgaaaatagctgaagagcatttctaatggtaaagacaattccttagtgcatcatttatccagccattttccagtttgaagaattgagtgagagtcattaagactgaatcaatttctatctgtactcgcatttctaatttggcaaaagactctgtgatgaaaaacagatttcaaaatgactacattaaatgaaacaaatgagttgtttattttatattcttttatgatatcataaataaattattcatccagaagctgaaagacttatgttacttaatgcttggaataatcaagagcaaagtgggttcaattactaaaaatgaggaggcagggagaagccaccagaaaaaagacttaatgatgaagtgctatgctgtcataattaaaatatgtagacccttctaggtcatgacattttaagttaatctaaacttgtaagcgtgaagaaataagtatcaagtaattctatattgcactgaccagaaagaaaagcatagttaataatttattgtatatttcaaaatagttagatgaaaaaatgtgaaatgttcccaacacaagaaatgataaatatctgagatgatgggtatcttaaataccctgatttgattattacacattgcatgcatgtgtcaaaatatcacatgtaccctgaaatatgtaaagttgtgatgaatcaataataaaaagatccattaaaatagcatctgactagagtgagatggtatctcactgtggttttaatttgtatttccctgatgattagtggtgttgagcattttttcatatgttcattggctgcttgtatgtcttcttttgaaaaatgtctgttcgaccttttaaaaagacttaatttgagggagtacctgttcatttgacacttttcctgtttctaacttgaggaaatctagagtagtatttgacaaaaactatgttttcaatttacctttcatatctgtcccactccattttgcttcgtgaactcttcatttaacaataaattgtctaaggaaaaaaaaaaacagaaaaatgtctgttcatgttctttgcccacttttaaacttcttttccccccctttctgagctgtttgagttccttgtagcttctggatattaaccctttgatgcatagtttgcaaatattttttcccattctataggttgtctgtttattctgttgacactgttggtgggaatgtaaattagtacaacctatacggaaaacagtgtgagaattctcagagaattactgtttgatccagcagtcctactatggagtgcatacccaaaggtaaagaaataattatatcaaaaagatactgcactcatatgtttatcagcattattcacaacagcaaagatgtggaatcaacctaagtgtccaccaagggaggactgaataaagaaaatgtggtatatacataccgtggaacactactcagccataaaaataatgaaatcatgtattttacagcaacatggatggaactggaaaccactatcctaagtgaaataactcagaaacagaaagtcaaataccacattttctcacctataaatgacagctaaacaatgagtacacatgaacatccagagtggagtaatagacattggaggctccaacacgtggaagggtgggagggggatgagggttgataaattacctactgggtacagtgttcactctttgggtgatggtacactaaaagcccagacttcatcatgatacggtataggcaggtaagaaatctacacttgtgccccctaaatatataaaagttaaaaaaaaaagttatgagggagatgaaaaagaccatttgaaaatactttatcaaatgggaagactttaatagtgagaactccatatagggtgtcttgctgtactgttaactaggattttttttcgggggctgattatctaaggacctttggttccattcatttccttgtttggctgctggtccgctgatgtcactgcttattggcaccttaagcagaacattggaggagaaatccaaagggttataatttgcaactggaaggcattgtagcattcagaaaaggacagtgtgaaaagtgggcttcctagaagcagacctgggatggggattcttgagcaagtgagttattgatggagagctctcagatgaacctgggagggagggagggagggagggaaagagggaggacagggcccaggaagaagctgggcaaacatgtaggcttgggaggagtccagcctcagcctgatgccacagggagctctggagagtgaattacaacacagagttgtttcacctgaaagcaagagggttggttttaagtaaccctgtgtccatcagtcactggtgggactcttcctttgtgtgcatgtacatgagaggatgcttgtgctggtgacctctggtcatttcttggaggggcggattctgtaagatgagggcacttttcctgagaaaagagcagctgtgagctgttagcagtcaacactgatagcagctgggagctggtggggacctagctagcaaaggttgtctgcatggtagcaccaatagttcctgcaggcagtcacatcactggtgcagcaggtgttgaaaataattggtaatgccatgtctgatgatccgaaggcaagaggactatggaacccacataggaggaccacagagccatagtgctctgaagaaggtggcatggatcagcaacttgctttggagacagtgggatatggtgacccctttttgaaatgttgaaatgcaacctctaaagagacaggcaagttctatattacacttacggactgttaaaacaccctgtgccttttcttcactgtattaatcacaactgcaattaaattgtaattatttctgtagttactgaatatcatctcctacacaataccataaaagcacctctgtatctctaatacctggcacatagtaggtgctcagtaacttttgatgaatgaacaagtgtgcatgtgtttaggaaaatggaggaaggtgctcatgggggcagcattttacattgattgttttacatacctgaaatcttttctctgctgtttacaccaatcctagccccttttgtgtcctgctcatcacccactgctgccaggcattccctccctaattcatcatgcacactgccattcaacacaaagcaatctgtgaaacatataaaccttgcttttccaactggttttatgtatttatttgtgatccaattcactacagaaagggttaggttggaatttttttgatggttgagtttacgttttgtctttggttttggtttctagaacgcttcttttcttatgccgttcttgtaatctgcagaaacgcttcccctgacaatcattagtcatttaaatccttcaaaaacctgttcatgggccattgctttactgactgacccagttggaaataacctttttcttctctgagttctggtagcactctgttgctaccactctgaagacacttacttttgcctccttaggtggtagttattcctctatctgtcatagttcctctctagatctgttggctccctcacatcaagaccacacattgagcctcttggttgatgtgtataccacaggtgcaaaataaatgctttttgtgctgttaacataaatgtgtacatgtcagataatcaagattatacaggatgatgtataataaggttggaagttggacaggaaggaagatgttaaataatttttttgaagttactcaaattcagtatttaatatctgcagaagaggcagaggaagaacagaaatcatgagaaatagacctgagaattgtcttaatgtaaatcagttggaatcaagagagccctagcatgggatgaagtatggcttctccatgaatttccttttcttctcttatatctagttggggtgatgtatgttgtacttgggtaatagagattttgcttgtgtgatgtcatcagtcccacattgtagggaaattctttccagaaatggagtcactatggcccccagttgtcctggacttgcctgtctggctggagcaggcacagatgttgatgatcactcctcagcttcgaaacaaggttttatagtgccagcaattcatattaaactgagcccatttcctctataatgtgagagcactttcttgatcattctttaatcgtaacagatgtctttgaagctgcctagaacaggatatggaaaatttgtccagtgatcaaatatggattcaaagggagattcctgatggttccctttaagctgtgggtgctgtttaaaaatgctacactgatacggtacctttgaaaagcaactaatggctagagattgctgctgaattctagaaggcagtaatctgatttccaaagatgctgtacatgtgaaacttgagggagaacgtggtgtggctttttttccgtggcagtgtgtcctgtcaatgttgtgttctgcaagactatgacttttgtagtctcaaataagctagtaagcagagtcacttttttagtgtgtagttttagaagtacagagagcacacacctttccccaaaccttgtttatattggggaaacctaactcagtgctacaaatactaattaaggcatataactatgctaacttgctactgtgatggttccaaggatataccaataaagcaaagtggtaaagcagagactttattagtaaaattatagaattagaagggattttaggattagctatgacaaaaccctcactattgtgatggtgatgtgagaaggaaaggaaaagaaaactaacatttattatatgatgattatgtgtcagacatgtatatcgtgcgttatttactcctcccagaaactcaatgtaggaaaacatgggaatctatcaactatctatctatctatcatctatttatctatctatctatcatctatcttctatttaaattgagtacaagggaggctgtgctgaggcttttaaaagtaatgtgaattcttagaaaatccctgtgagatagacaatatattttttatttcagagaagaggaaagagaactgaagacattaaatggcattgctgggaagtgattcagttggtatttgaactggtttgtacataattgaagcccttgctctttcctaatcctcatatttcagctacagacatgaaggtgtagatggagggtgtgtttcaatcaaacttttggggccttggctcagttgtctttcttctatttcatactgaacatccctgcaactagggacaaggaggaaggaggcatcatctgaccaagagcactggcccctgttaaattctttttcccagattgcatgccctcgatcagcaactttaattccaaattttctgtgggaataaattccagagatcgacacatatactttccatttaaggtgtttccaaagttgccgatttaggccacttgaagtattcttttgtttgcttatgcaattttaatttattattttctaaagagttcgtattatcagaaatatgtttccagcctcctactttgtgtttgatgcctctcttctccctggtatctaccttggatctttcaggctggagttagaacaatttactccttcttcacagcttctggaaaagaggcaatagttagtctctgaacaacatccattgcatatttggagataattatggaatcccctcccagcttttgttaacatgaacttttcccttagggacagtttttaagtatggagaaaccatatatcaccaagcttcagccttacttttatagatggggaaagggtgcgtgaagcagggaggagatatgtgggcttctccaccctgcatttgagcaatccagtgcttagatgacacctgtactttggtggtggtgaaagccaaaagacttcatggcactgtgtgagtctcaagtgtccttccactcagcctaagggagaaggatattagtccagtggaagctgttagggaaccaatcaaattcatttgcagtggcaaagcatgttaatctggatttttgcctctaatgataaggcaatgtgatcagtggaattagcattgacttgagacttggcacaactggtaactgattatgtagcctaggataagcctctttattttcctgtttctttttttctttctcttgactgaaatgaagagttggaataaacaacctctaagaccccacccagatctgaaattctatatcttagaatctctaggagggaccacagcattactgctgtctccccattatttggacaagcacaaaaagatgagttacttcattcatggattagcggggtaatgtgactgatatcttgttggaaaatcaccaggagaagacaatgtggtgtattgaaccaagaatcgggtggcctgagattgagtcctgcctttgttattaacttactgggtgattttgaagaactgaaacatttgggtgtaagtttctcattacttaagtgacaattcaaattcaatgatctcttgaatgcctactattggtgctttctacgttagtcattgagctaagagtagaaagaaggacaagatatgattcctaattctgaaagcttacaatttgtggaggagtaaataaaccacatagtgcttatgtgaagtgccataacagaagtatattcagatgctacccaaatgaggagttaagaatttgtgcggagtaagagaatagacagagaatactgttgaggtcacatttggttcagtactctcagttaagtggatggagggaagagcattctaggcagaggtgtgagcaaagatagggaagaacaaaagaaaaccttgagaaataacactgggtgagtgaaggatgtgaggagagggggtgcagggactggaatagagtttgcatcatcctgtaatggacacgtattccttgtagtgtggtttgcatgtctctaccaaaacttatgttgaaatttaattaccattgtattaagaggtattaagaggtgggacccttaagaggtgattaagtcatgaaggctctgcccttgtgagtgaattaatgtcattatcatgggagtaggttagctattatgggagtgggctcctgataaaaggatgagtttggcccctattttctcactgtctctcgtgtggccttcctcgccacatgataaattctgtcatgggattatatagcaagaaggccttcatcagatgctgagcagatgcaagttccatcctcttggacttcctagactccagaactgtgtgccaaataaacttctattctttatgaattactcagtctgtgatattctattatagcagtagaaaaatagactaagacatcttgctaagtaatttgaaccttgtcctgcatgcaataaagatttattgaaacattttaaaggagtagtgtggtcagatctgtatattctggaggaaaaatgggaacaaaagagataaaaagcaaacagactaaatgagaactcttgcaaatatacaagaagaggatatgaaggcctgaaccaaggcattggcagagaaaatggaggaacaagcttcaggatgggaattgtcttgtaagtggaattaggattggctacataatttgtggggcctagtaaaaaataaaattgaagagccctttgaagacataattaagaatttcaagacagtgacagcagaattttgaactggggacaggggccttctaagcatggggccctgtgtgactgctcaggtctcatgtccttgaagatcgccatgagtagaatagtactttatttccttccaggtttattgtgatcatagtcataaacactgtttacaatttataagagtatacattttggggtgtctattttacagataattttattctgtgtattctgctttttgtttagatttttttttttttttttttttttttgagatggagtctcgctctgtcgcccaggctggagtgcagtggcgggatctcggctcactgcaagctccgcctcccgggttcacgccattctcctgcctcagcctcccgagtagctgggactacaggcgcccgccactacgcccggctaattttttgtatttttagtagagacggggtttcaccgttttagccgggatggtctcgatctcctgacctcgtgatccgcccgcctcggcctcccaaagtgctgggattacaggcgtgagccaccgcgcccggcctgtttagatttttatcttaaccttttctgaattgtcatgccacgagacaagtccaaagaaatgcctcactatgacgctgcctagaatcttcagcaggttttctggaggaaaacgtttcttaagtcacaaagcagtttcttatagagaaagctaagaaaggagaaaacaagaaaatgcaagaaaaacaagaaaaaagcttcaaaagagggccttataatagggtgatatagaactgggtttatttaatctggagaacgtagtagggaaggattttattatggtatttgtattagtcagctatgccatagcaaagttgggtgacaaaccatccccaactgtgatggttaatagagtgtcaacttgattgggttgaaagatgcaaagtattattcctgggtgtgcctataagggtgttgccaaaggagattaacatttgagtcagctgactgggagaggcagacccacctccatctgggtgggcaccatctaatcagctgccagcataaaagcaggcatggaatgagcagacttgctaagtcttctggcctctttctttctcccgtgctggatgcttcctgccaacgaacatcagactccaagttcttcagcttttggactctttggacttgcactagtgatttgccaggggctctcaggcctttggccacagataaaggctgcactatcagcttccttacttttgaagttttgggacttggatgggcttcctggctccccagctggcagatggcctactgtgggacttcaccttgtgattatgtgagtaaattctcctaataaactccccatcatatattcatctatcctattagttttgtccctttagagaatgctaatacaccactcagtgacacataattggcagttattctcatgctcaataggtcttcaggggacctgtggtttagttggtcttaagtggcctcaaatgcatgactactacagtttgagggttgactggtcttagatccaggctgtgagttgggttcaggtctgttccttgtgcattttttatctgggggctcagactaaagagacagtgtccacccagccctgctcttctcgtggctatcacaggaagtaggaggtcaagccacactctgtggaagcaggtggaatggcacttgccgtggccaatggagtgtcaacaggttgcaagtatacggccaaggccaatgtccctggagcagggaaataaacttcacccacaaaggaaggggtaacagagtgaatatttgctgaataaacctaactctcacaagactcaaaaatttgttctttcagaagctatgaaacttggttgctggatcgttacactgaggctaataatgaaaggaaggcggaataaagggccttggttagctacaggatcctatcggacaggaaggattgctgtttggcagagggtgggcatttctgaagatcttcagggtaagctcattttgtcttttgaggagactgctatgtgaggccctgctgggaagaagtggcaaggtcggaagtgagttcaaagatttttccaggtttcttcaagttgcagaactgtagagattgaacagtggcctcaggtaacaaatgctcaggatgaatgcttcccctggttctcagactacagagggagaagatatattttcctggccttcatcagaccacctctcaggatacttgaggtttcttttctttttttaaaaaaaattttagttttgatttgatagttccaagtttttggaagaatttgcttaaaggtttggaggtttttttttttttttggtggggggtatttaacattttccttaggatttaatactcaaaattttttcagaatcctctttcaaatcaagaagcaccttaggtctttgtgaatatgttcctgatttgcaattactagctggaggatgatattaaaataaagaaggctaaagatagttcgctaactagtagatgtagaagggatgatagagttagaatattactattttgaaaccatcattagtaattcagaaaaaaattgtgaatgcatgctaaaactagtagatgaagttgaatgaggaacaggatatattcatagccttaaggtatcttcttacaaactacttactaattgtggaggaaaaaataatagttttataatagaaaaagttgacaggcaccatctcataccaagtgatccaagttatcgttgccagcatctcttatctctcttgatgtgatatgctgagaagaacacatcatttctgtgataattgtaccaaaggatgcataaccccaaataggggagattctatgaaagaatctctaaaaaaatgtcaaggtcatggaaaacaaaggaaggctgaagaactactccaaaataaaggagaccgaaaatgtatgataatgaaatggaaagtgtgagtctggattggatcctggagtaggataaaaaaatatagctctgaaggacattgttgggataataggtaaactttgaatgtggactgtgggttaaagagtagaattataccaatgttaaatctatattttaataattgtgctatggttacgtaagaaaacatcttcctcttaagaaatatacgctgacatatttaggagtaaaggagcatgatgtctaccacttattctcaaatgggttgcaaaaaattccttttagagagaaaggagaaaacaaatgggaaacaatttcagttagccccaatttggacgtggataaaaagtaccttggaggtgttggtctgattctggcaacttctctggagggttaaaaataaatcaaattaaaaagttgtacaaaagaaaaaaacctttctcaatatttaaaggtgcaaaatatttcgatgtgatataattacaatatgttgttgcagtactgtgaaaccaaagctttatacttttaaacagttaagtctgattaatgaaagcagaaaaaaaaaatccccttagacttagcaacaaacagactgtacccctggacaacactgatgttgtagctctcagtgttcttcccagttttctgttgtaggtcagctatgcctcacagtttaaaattgcgaataggagaaaggtattgttttattttattagctgtggtagaaagaaactagattttatctgaaaagcattttagactcataggaagaataaaagaatagaaaaaagtttctttgttggcacttcttgatcttacagaatagcataatctattgtgattgaggttctagaaattagaaaggaaagtttgctgtaatggaggggcgttgatttggaggtttggtagcaatggaaatagtcaaaacaaaagaattaatttcagtaaaaattgtttgttggaccagatcctctgtgagtgagccatgagaaaagacaaggaagttgagaattggaccattttaaaaagaacatttaaagacttggattcgtttgcttctttcttgcctacagctcccatttcaccattttcttcaaatccaggcaaaataagattcactgataccatcaggcctcatgtttgtgattattttgcttatgttttaaagtcaattctttccacaaagttgtgtattctccaaagatttctctgatctcgcttgcttttcagcagatattggcaaagacattgatagatgtttcaaaatactcaattcattccttgactgcttttatttccccctttttgctagtgatgcctaatgtatgggctatatatcttttgccagtggtagagacatattatttttactgaaagcaactaaatatataagctttaatttgaaaatgaaactgtttaagaggatcttagttttcattttttagcactgaaatccctgttgtcatctttgaggaagcagtaggtggagctacaggctttttatcacgaaagaatgtttgcagtagctgcccattgccggaataacctgaacaagcacacatttccaaaaataacagaggcatttccaagtattccagaaatatatgcaagactgtttagtcattcataatcaccgctttgcaagtactagattctgtagaaaatatttcagaagcagaaaaaagattcatagaattccctgtatttttagaaaagagatttttaaaaaatggaattcaagagggagggagagacacttacgctgttcaatcatgtgccactttttttcccaggtggtgaaagggcccagaggggtagccgggggtggaaaaaaatcttttccatttgcgtcagaactctgaggagctcttcatttccccactcgatgaacttttttgaggctctaaactgtggtttcaattttctctgaatcacagaggggtagcctaggttaagtgattctgaggaggccagaaggcgcttacaacagatcgctcctgaggaccgttcctctcatatagcctggtgtttttgaccattttcctaagaaagaattatgaaatggcttttaatctctgtgaaaaatgtagattctctccatgtaaaaatcacaaattttgagaaatgcttcaatgatcttgtttcagggttctccagaaaagcagaaccatttaaaaaatagaacatctagactattttttgactaaacaatggggtaccatagccaagccaagctgacatctaaaattaactatcatggatctcgttgctataatctggtctcaagccccacaaagaaataatatatgtgtgtgtgtatatatatatatatatatatatatgtatatatatatatatatatatatatacatactagcccatatatatggagagagagggaaagagagataccttcacagtgatatctagacttgtgtttgaccaaacaactgggtaccatagcctagtcaagttgacatctaaaattaactaccacaggtctcattgttatgatctgatctcagagaagcccctcagagaaatgctgaagaatatcttaaggcacaccattgccctggatgttaagtgttaagggagggccacacgtggctgcagtagaagaggtttaccacccctgaccctgttactaagcctctccctcctacttgtttgtcccatcctctcctggggacagcaaattatgacataaagctagaaaaaagacaaaaagggagccattgctaggacttgatggatgaaggctgcagacatcgatttctctgcctttggctcttctagacactcctgttgatgatgacttccagttagaagaacagcagccaagatgcctcctgactgcagagctggctggaatagatctggctgctatagaagcccttcctttttcattcagtcctcacagcaaacctctgatttacaggcaaaaaaaaaggctgagaaaggttcatggattcttcaactgctgagcagctgccataccctggacacgactctgggtgctgggaatacacacaagtatgataagaacacacatatttctttctcttacggttctaacattctaattcagacaacagcaaacaaaataagtaaataaacaagtgaaaaagtgcaaattctggcaagtgataggaaggaaatcagtaagtgggctgagatagagtttacttggggtgtggtgggaaacccacttttggtgtgccacaaggaaggctgctgtggggtggtaacatctaatttgagatgtaaatggacttaatagacttggctaaaccttccactcataagtaagaattggagctgggaggacattttgctgttgttttaactcatctataatctttatccatcacaactgtctactagcttagaagtagtatgagataaaaagatctggtattccatttcaaatctaagagggaattgtgaatgcctaagcaaaggctggtaggtactttgtgaatgaacaaatgtgcctgaatctcaagaaaggaaatgctagacaatcttaagcaaccccagctagagtctttcaaccactcctgttactcagttcttccttctctgtagccggaatgtttcgtgctgtacctgcaaacttcttccttttgccttgtccttggctaatgcaaagaactaactggtggttgtccttttttgtaagagatgcctgacagcctgaccaatttggagaaaccctgtctctactaaaaatacaaaattaggcaggcatgatggtgcatgcctgtagttccagctgctcgggaggctgaggcaggagaatctcttgaatccaggaggcgaaggttgtggtgagccaagatcatgccattgcactccagcctgggcaacaagagtgaactcctgtctcaggagagaaaaaaaaaatgctcgacatgcttctcacttagattaatatgtcacatttctttcattagcctgttgttgtggttcatattctctgattgtttaatggtctttcaggctccacataggttgtacagatggtccttgaggcaaccgcagagggcgtcattcacgttgcaggtgtgtcaacaataatcacagtggtaatttgttggtgtggggtagaaaagagtcttaacaggagggaggcacttcccctgcatatctccttatcaacctccctctttctttctaatgcgcaaagacacttaggatgatatgaagtgagtttatgcattttttctctccccttagcactgtgaaggcacagggaggatatcatatagggcattgtccattttcttctttttactgctgacaataccagcttttcatttggtgtctggaagcctcctgaaattacatgggaaattttgttcatagacttttttttttttttcccctggggttagggtctattgctttcaacagactcttggagttacctttccccaaataaagaatttcttactttcaggattccctcaagtataaaaggggtggtgaaggcaatgtttccatctcaaaacagaaaggatattctttacttgaactatttggagagtcatttaggaggatggctgagtgtaaccagcaagctatgttcatttggtccttcttgaatttcttttcatcacttcctctcactctacccactggtggtctgttggaggctcatagcaatacccttcccattgaaccttctctgagaatactctgaattcagtgagattttcccttcttctccactaaagatgcatctttgggtcccattctgctgctctacagttgacagtcagtctgcatggtgatttagtggttatttgtgttagccattctagacaacaagcttctttttattaataataatataaacagatgacatttggaaagtactctcacctgagaggtagattggcaccttaaacctaaagaaggatgccaagtgggagaatcaagttgagagagagaagatattgggcagataggacaagaagtacttctcaactcatggacacaaaaaggaaaacaatagtcactgggacctaccaggatatggagggtaggagcagggagaggatcaggaaaaataaagaatgggcactaggcttattacctgggtgatgaaataatccatacaacaaaccccatgacatgagtttacctatataacctgcacatatacccttgaacttaatttgttttctaaaaggaaaataaagtttgcatttttgcttatggaagtaacaacccatcattgtagtccaaagtgaaaattttgggggaatgtcatttcagcacctttagaaaactaggtttgaaatgtatttgtaaactgctgtgttggagtggatattgacaagaactaactcaattcccagtgcaaggcatagaagtaacccagtgatagtgccatgcgccctagcatagatgcctgcatgcgtggatgaccactgggagctcctgaagacagggagctgtccacctccagcactcagtaaagcttgtgaagctgaggggagacgggagtgaaacatgggtctgggagtcatcagaaagtgaagccaagcctctggcatacagggttattccgttccaaggatcaggctgagaccttccccttcctcagctctttccccttcactggtttgtatgtttgtcccctccaaatctcatgttgaaatgtgattctcagtgttggaggtggggcatggtgggaggcgattgcatcatgtgggcggatccctcatgaatggtttagcaccatcaccttggtgatgagtgagctctcgttcagttagttcatgagagatctggttgtttaaaagtctgggacagcccttcctagctctcttgctgtcactctcaccatgtgacaccatgtgttctccctttgcctttcgttatgattggaagtgtcctaaggccctcaccagaagcagatgctggcaccacacttcctgtacaccctgcagaaccatgaaccaattaaacagcttttcttaaaaagaaacgcttctcaaaaactctgctcctgtggggagttgaatgaatcagggacttgcaagttctttcttttataggtcaatgttctcattggaaaaagttcgctatattttatttaccatctttaaaagcccaggttgaaatttctaactgggggtaggattttaaggagggtgatattttaagagacttttcattcctggcgtggtgcttgatcaaataaaagctttaccactttttatctttgtgataaaaagatatttaactcccttatgcttcagtttcttcatctataaaatgcaaacaatagtacttcttataagattgttgtcaggatttaatgacatgattcacataaagtgcttagcatattacagggctaataacaaatatgagctattaattttaaatatttctgcagtggtttaaatttttgaaacgagtatatgttatttttacaatgctaaaaattagagtagaaaattaaaaagtaaagtctagattgttcaatcgggcttgttttaaatttgttttttatatttttcactctagagaagagcacctagcatcttaactcctcatgctgaagaggaaatagttctgagcaattatttatttaaaatattaaataatatttaaaatattaaataatgtttaaaatatttaaaatattaaataatgtttaaaatatttaaaatattaaataatgtttaaaatatttaaaatattaaataatgtttaaaatatttaaaatattaatgtttaaaatatttaaaatattaaataatgtttaaaatatttaaaatattaaataatatttaaaatatttaaaacattagtggtggtaaggtgaagaaaaaagttaagttggttgttttctacaagttaaatagataagttttgtggttggtaattgaaatagggagcaagctttttgtgaaagctttaaataaacttttagagttttaaaatgggaaactcaaagtatattttgggaaaatgtacagtttagtacaagccgtgagctgtctcatatgtttagagcaaaatgctaattgggtaagtacttggagatgaagctggaaagagaagctgagcttgaagagccttgcttgcggaggtgagagagtggactcttgttgagccagtgggaagctggcagtggttttggagaagaaggataaattcaccagagtgtaaatatattcttattactggattaaatcacttcaaataatttcatctggtaaaaacttgaatttattcctagttctttgtgacaagctagcaacttgaattttcttttctttttttaaagtagttaaaaaaaactacaggagagccagatctgacaggagagccagatgttagtagggtttgctaacatctggctctcctgtcctccctgggcatagaggagtctgtttcccagtcctcttgcaattagagaggggcacgtgaatttttctggctaataaaagcataagagaagtatattgcttccagtgcctctgcaattctcctgtttctccctctgtctttctgatcatggatgtacctttgtgttgtgatgactttgtctcataaaccaaagcagcatggattactgaggcaccgtatggagaatggttgccctgggaagttgcttgaacttgcagtgtattttgtatgagtgataatctttgttgtgtgaaaccactgagatgtattctttggttacttctgcataacctatcttatcctgactattaatagcaaaagctatgatgtatataacagccttctaggcaacgtgagctgcccaggaatcatgaggttgttaaccagcaagggatggttgtgtgggcacattcttcaatctcaagtagctttacctgtcccaggaaatataaacactgcagctaaatggaaacatggaagaaggagataaactgcatgcaaccaatcctaacaatctagagatctagctacactttgggggatatgtgcttataagtactgatctaacatgaggttgaagaagttaaggtaaaggtgggtatatttttagaaacacttgagtcacgttatctagaagggtttcctagaaacatctgctctaagttgatgggaggggagggaatttaaaataattttatatgatagttttaagataaaacaaaaaaagtgactatatttttctataaaaatattaaggtaaaaagttgtgcaacttaggagataaaattgaagataattaaaataagaggagaaatgaaggtagaaaaaaattgtctggtaggggtaagaggaactaacgtggtctggtggccaaggcaaagagagaaacatcatcagtcattaagaattaccatgttcctaatataagaaacacactaattcttaagaaaagcagagccattcttggccatgaggtctgatggaaatttctaacttgtgtccacaaaattagggaacagtgatctagggactatacatagtaggaaaaaagatcttagtagtataagccagtcaagaggcactgagagttgtttcttcaaagaaaagtaaaacagaaaagctgggaaataatgtatatgcgttattctttgacctagaaattgcatgtgagtggtcctatgacttaatatttttagtttatcatgaaaagtacaagaaaatttggggaggttagtttctagagattgcattggctatacaatacttcatggtgttttatttgggaaagaggtgtgaaagttttattactgtttcactgtgtgtttgcatgaatgtatagagtaccttttggtaaatttgaaagatttccactgcactacctgatatgtttgctttaaaaaactcgtctccaaccttaagaaagatatgccagtagttataaaactatgtcgttaaggactaatagacagccatagtagatagttcttaaaggattggcagttcactgagatgatgagataattttatagttggagcaaatgaccagagagctcttttacagctccttaaacaagttaatattgattttatgatgctttttctattattttataagggaaagcagtgagaatatgaggtgttggagtctgttgctcacttttatgaactggcctgcttgcttttttttttttttttttttttaattaactatttcctgctttccaaggcaattggacagactatttgtaggtcaaacaagaaggcagaaaataagttttctttttttttaattaaaagtttaaaaagttattttaacatgattttagcaaaattttagcaactatttttacataattttgtcttgaacttggattatttcatgtgcatgtcaatggagccaggcctcttgtcgaaatgctaattggggtctcacagggaagtcccaaaacagttttatacagccacttttttcctgttttgtatccagaacattctcagttactgctctctgaatgttgtctgaacacgtgacctacaaaaagaccattactgtggccgccatgttaatgctgctatgtaattctcctttaatgcatatccttgggggtcactctataacctgatttagcctttggcttcaccatccctacatctatatttttcttaagaacttccttttggaaaagcttgaagtcataaatgtcctgaaatcagattccagccatctgaaattatgaaccaattggcaccattaagtgtgtaggtttgtatttaatcttctccaaacttcaggatctcaagccacggtatcagtggatatacatttatatgatatcctgtaacatagttttctaattgtcttggctgggcagatctctaagtgagctgagggtgggccactgaaatgaagggtaagtgttcttggactgatcatgcaattgtaaaacactgagcttcagtgaaactaagtgggcccaggtggctttgctgtctaaaattgggcctttccaaagccttttatctcttttttcctttagaacatacaagttcttaaaaaataatcagctctggtgggaaactttggctaaagaatttatatttttaggtttttgtatttaatatgtcttttttcacaaagcaagtaaaatttcattatgcaggaggacacagggtttgtttagccttggatgtgtgatggcttcatttccaaatgtaaggacggtgctgggtggaggtttatttcagattgttggcatgggctatggcatcttggtttgaaacaaatagtcccaccctccccaaatcttaatgagactgaagccagagaacagaaggaggccagagaacagagactgaggccagagaacagagaactgaccccagataagactatttagaagttaaaaggtaagctaacaaatcattaaaaacaacgcgatttagcctcctatcttgataaattcaccattgtctttacttacctaaaaggcaaggttcaaatttagaattcttacaatccttggagtctctattggaagaggaactgacctcagtccaggcctgcagctcctctctttatccctccacctccctcctgtaccagcaaagggctctctcatgtgcaagctggtgcatctaagccacatgaacagctgtcccttggttaccccttgggcttagaggggcttagaggggcacaaactagagacatatgctgccttcagcagcccctagaagggacccaagggatcggatagccctagtagtgaggtctggtctacaaggaggctatattagtttgctaagactgttaggaccaagtaccataaactgggtggattacacaacagaaatttattgtctcacagttctgcaggctataagtccaggattgaggtttgagcaaaattggctccttctgacagttgtgaggaagaatccttcctgggcttctcctctggcttctggtgatttgctagtgatctttggtgtttattggcttgtagacacagcgctctgatctctgacttcactttcacatggcatcctccctgtgtgtgagtctgtggcatcattttcccttcttataacgacacttgtcatattggattagggtccaccttaatgaccttatcttgattacatctgtaaagaccctatttctatagaaggtcatattctgaggtactggggttaggacttcaatgtataaatttggaagacacaaatcaactgatagcagaggataagtaagtgtgggctcccagagggcacattcccttggcctcatggacagctcatccttagggaaggttgtggctggatgaggcccagagtgaagctctctaaaacttgagacctgtgacagggacccctttaaggactatgctgagaatacattctttatcaccaatatcactgcagtctttgacatgggatgacccagcagtttaaagagcaacagaaatagaaatgaaatagaaatagaaattaacttcaacttcttctgaatttccccatttggctaaattaagtaaggctcttccccacactctgaatagtctttccagtctagtccatcttatcaattcattctctcttcacccctaattcccatcacaacttctcacccagttcatttgatagcttatgagtgactgcttcttacaaccaaaagtgttgatcttagcacgatgttggaggatggcaagtcctcaataaaaacgtattggttctctgggcctctaacttctgttgatggcatatttaatgcatcagctttgattctggacagtacattcctagttctgagggcagtcaggccttcactgttctgtatgtgggctatttctgagcccacattttaaaaataatccatggcgggaaggaggggtattcaattctgtgactaaaaacaatctcctgggagccaaagaaacacacagataatgtttattctccaagctaaaaataggtgggctggtatttttagtcattccccaaaatatggtgtctggactcaaattcagctgtgggtgtctgtctttttgggatccaatgaggctggcagtgcggggaggagtccgggtcagatgctagaataaaaaaatgtttctaggagagaagtcgggccttgctaccaatttaagctttccagctaatgagggtgtagttcaatttcaaacatttttagagtttaaaaaaacaaaaacaaaaacaaaaacaaagcaacctcaatgaattatcgagtgcataaagaccagcagttgttacatccttggctgtcaaaatgagctacttcttcccctcagatgagggcaaaaagtggtctggaatcacagcaaaattaatttgtttgctcgggtataaatttaaaacgactcacctgattttttttttattcttctgtaatttgccagagttaattcagtcccaagggattttctctttaccaccttgctataaaatctgattcagtttcatacagtttttttccccagctaatgcccagactaaacgtacactttaagaaaacaccagggctatagcctgtgcttttgctatgtttcttgtatagactttcggggacccttggtgtgggaaacggaagggagggttttcaaggcatttaaagagtttaagaaatctctacaaatcagcatgatgttttttctcccttctctagaagtcaagtttaagggatcatttctttaccaagtcttgcacctactgaattactgttggggttgagaccaactgcaaggtttcaaaaggaatggaaagaagcatacttaatgaaaaagtgctgaggattggatgtcaaacttaaaaacagaatgtgagttattcctgtgttgtatgacaaaggcattttccttgcctcaccagaccaagtccaggaataggaagggcagggggctgcctccaaaacataaggctgcatgtgggattcccactaaacccatcccacagacgaaccacatggaagatgtctaacgtgaccagtggaatgagcaacattgatttctctcagtgttcgccacacgcgttccatcattgtgctggcttggtaggagggtgctgggatgcagcagcgaatgtcttaccgagatgttctcatcgcgtgagttaggatggagtgacacatctccttgtgttattttgagctgcttaaaagttcatgttgtgactatgagtgggtttagtatcagactatatttcttaaatagaaatcaagtccttgattgcataattccattgcttcaaatgttataatttggtaacactgaagagaggatctatggccaaaggatcatgtgatggaaaaaaagggaaaaatgtcatttatgctgtcatatgccaagtagatgtaattttaaagatagtgtcttccatccaaaattaattcccttatctatagtaaactacatcagatgtcatgatagaaattatggccatttggagggggcagttgtaccgtagtttccaaacttttttttttttttttcaaagcatactcttattataaccatttttgagattaaggaccataattttggagccattatctttttctaaaactcaaagtacaatttatttcctttttggcttcatgaaagtaagttattttgtttctcagaatcacccattctattgttaagacggggactctgaagccaggtcacacaagaagttaatgggcaaagtcaagaacctacatattatggccatttcttaaactcttccctgggcctgacaaaaataatttgatttatgtatctagtgatttttttatcacttgtaattaaaatatgaagagttgacattttttttcctgcttggtattctccacacaatcttttgggaggagcttgtggatttttctggactcctggggcttgcctggctacctcttctgacagacctggacacagccctgtgtgtgtctgtcacactcagcagggcagcaaatggcaggatcctgctgtgatttcacagtcctgcctttcttctcgggcatccaggctaggatatatatataccattaccacatcattcatagcttgctgtcaacaagccaagaaacacatcgccttatcccacactcgcattagcacgaataatttaaatcaacatttctgttgggctgcattgggggatactgttgtttgggaagtcgggtgcatccaccgggctggctgacagtcataggtttttcttgctcttggtgggctcaagtgcttgtctaaatacagccccttaacactgccttgttgtctcagcccagcaggcagtgattttggctcactacatcacagcctctggtgtcaacaaagtcttgtctttgcagttttcctggtgttagcctgaagggtgtatgtctctgtctgtgagtctgtttgctaggaaagttttcctccctgatggaggaaagggggcacagaaataaaccacagagttctctagaaatgtcaaggattcatttagatttaactgtgaggtgtatgttcttcttttgtccccaatctttctctacttttttgttttttagagatagtcttgttctgtcacccaggctggagtgcagtgtgcaatcacagctcacttcagctttgacctcctgggctcaagagatcctcctgcctcagcctcctaagtagctgggactgcaggtcccaggacacaccaccatgcccagctaatttactttttttttttttttttgtagagatgaggtctttctatgttgtccagactgatcttaaactcctgggctcaagtgatcttcctgccttggcctgccaaagtgctgggattataggtgtgaaccacagtgcccctcccctaatctcttgacgccctgtgttggcatattctgatgtatcctagacttcagtaacctctaacttggacaaccagccagaagacagttcaaatctaaatattcttctagtctcctttgtgcatttcaataagaacaacaacaatatgtgcacactgagatttctcctcacctgggccatggggcggattgtggaagtacacaaagtggtccacgtgtttactctcctggtatttacatctttacattctttcagatttgggatgtgacttttaaaaaagacagtgccaagtgtaataatagacctgttagtaatgtacatgtgagatacagactgacattttgaggaaacttgtagggtaaaataggataatgaaagacttcatgttagaaaatagcttctgaagatgaaggtagaataaataattatctgacatttgtctgttcctcctgcttctattagtcataattatttaggtcatcacaaaggctctgtgtcccaattcttcactctattgtagtaatattttacatcccatccttgccatggtgtcatggtgggcagagtagatggccggatgtcttgactttggacttggccatttgacttgcccagttcaattggatgttagctggtgtgaggcctatgatgtgctggggctgttgcggatggcttgagcccaggagtttgagaccagcctgggcaacatggcagaaccccatctctacataaattacaaaaattagctgggtgtggtggcatgcgtcattacacttcagtctgggtgatagagtgagaccctgtctaacatatatgcatatacaaaatctgccccccatctttactgttaattgttaagagagacctatggttcctccccactggagagtggccgattatcagccaaccttggcagtctgtgtctttaattcctgtctcagttttttttttttaatttttaaaatcttgtcctcttatgcttaaataccccttctgcatgtagtttgatgatatttggtagccccagtaattaccaggcttaattgatctgttaaaactcatctaaaattattttttctcttttttttctgatttttctctctagaagttttttttatactggtaagctgtgtatgttatataccaaataaaatttcttttaaataacattttattatttaatttatttgccagatttactgaagtatgatgaacaaataaatattgtataaatttaaggtatacaacatggtgttttgctgtatgtataccttgtgtaatgattcctataatcaagctaattaacatattcatcacctgatgcagttaccttttttgtgtgatgagaacatttaactctcttagcaattttagttattattaactatagttatcatgctgtatattagatccctagaacttattcatcttatagatgaaagtttgtatttactctttgaccaatatctccccattttcccgacaccccagcccctgacaatcaccattctctcttttaattctgatatgatctgattttctgcttaggatcacagtgtgattaattctttcccctatgaaaattttgaatttagataggcaactgtgagttttttttcccatttaatcagtaagcacatgttaaaggctcactcacaaaatgcctacaaaatgaacacaaatgaataattatgtccagtttaaccatgggcaatattatatatgcatatttacatacatatgtatatatgtgtgtatgtgtatgcatttatgtatatttacatatatatttaatcacagtctgtttcttataatagattaaccagttgtatggtgattttacagtaatctgaatatttgatgagcgtacaattctccattcatgttagagatactttacaaatgtaagggcaaaagcagctatagataaaagtgggcaacatcaatgccaaacttcctccctgttaggttccactcaagttatgaagttttatacacatcaatgcaaaatgcaagcccccttttcctaaaccttccccacaatagacccagctgctggactcttctggcctgactctatcaccacaggggccacatactttctccctactacttctttgatccccttattggggctatacctgtggtaagatgtgtgagtgcatgtgtgtgtatgtgtgttttctctgctcatactttcatttatttcacgcattttttctcacacgcaggataacattcccttctacttccttcactgtaagttctttctttcaaccttgtctggtaagacctggggacatttcacacaagcctgtgtctgtctgcctttctcttcctctctgcatgcatttgaaataagcaccccaggtgattctgattcatgtagtctgagaccactcttagtggaaagtgtgcatttttggtattaagcacacctagactttagtcctcaccctgtcacttcatagctgggttatggtgagcaactatacccttggatccacatctgtaaaatggggctaatggagtaccaggttggtttatgtttgtttgtctcttgtctttgctcttagattttgtaagccatggtaaacgggatttaccatgagcaaaataaaggatgggctgaagatagaagtacaaagagttgatcagttctagcagtcagaaagtgggactggatttagtcatgctgcaatgtatgcatattttaaaacagcatgtcgtacaaaataaatgtatataatttttttttgtcaactgaaaatacaagaatgtgatcagaagcaagctttatgtatttaattttattatgccaaactagatttgtccagcacagagcttgactcttcattttcagaatgcatacatattacaaaccgctgaaacagagtaagtctattattttcacttgtgtattagtttggccagggtttggtggtatatattcaagggaagccaaaatgtttgtttgagcttgtttgctattaagaactctgttaacattggttcatcgtcaaattatgactccaaagaaacaaacttcagttctctgtccttgagaatattgtgttttctaagttttgaaacttgctggaaaagtgctatttttttcactcatttgggcaaaatttagtaattcatcttgactcattatatgatgttgaatttactaaagaagatcttcaggcacttttttatgttagtatgatgataaatacatgattatatttaataaacaaagcatgtttattacatagttgaaaatcatattcttaggtgtttgcaaatagaattctaaggtttcagtatttgaactgaatattttaaaaacagttttgaattttggcaactgaaataaattctgggaaagtattggaatctaacattattaacaaaatactgtggcgtgataaatgttaaatatctcagaaaatataatcttgattatgccattatctcttctgtggtgaatagaatttatacacatcgcaatatgtgtttctaaacaaagggtgacttaaaatgctaagtgccttataatttagagtttagacaaaaactgtattctcaattgtgccacagttttatggtctcctactgtgtagtattttggcgcagattagggataaaccatcaatggataataaatctaatttctgagttactggcaatgtctttgatatcaaataaaggtttttctcctagttggtgcactacttcacaatatagatgcttatttatttgaaaaaaagtgggaatgtttgaaaatgttgccatgtactatagcctgtctttttttctaatcacatctatttagataaggtttgctgataattttaagttttgttaaaagtgtataacaaggtcctatgtgtgctaatacaaattttcagaaaattatttttgtttctaacaatattattaataattttatataaggagttcagataactgagttgtcatattgacttttaaatgatgttcaagtttccaggagtcaggattaaaactttaaatagagaactgaaaaatatatataaataaccagatgggaattttagaacaaaaaaaaataaaagtttaatgagtgggtttaatagcatactagatagagctgaagagagaatgagtgaaatggaaagtagtcagaagaaaatagaaagaagcacaaggacacaaaaagaagcacagaatacagggtcagacacaaaggcagtatgtgtaattgaggtctaaaaagggaagcaaagaagagaaaggatagatgcatatttgaagaaatactgactgagagtttttcaaaatcataaaaattacgataccaaaaattcaagaaaccccacagaccataagcaagatgaaaaaaaatgaagcatacacttattttcattattgtaaagttgtttaaaaaaacacaaaaagaatatctaaaaccagctggaggaaaaaggattacctttcaggagaatcaattagactgtccccaacatctcagtagaaacagtggaagctacaagacagaaagaaataatatcttcaattttttttttttaaatgagatggagtcttgctctgtcacccaggctggagtgtagtggcgtgatcttggctcactgcaacctccgcctcctgggctcaagtgattctcctgcctcagcctcctgagtggctgggattacaggcacgtgctgccatgtccagataatgttttgtatttttagtagagatggggtttcaccatgttggccaggctggtcttgaactcctgacatcaagtgatccgcctgccttggcctcccaaagtgttatgattacaggcgtgagccactgtgcccggcctcaaagttctaaaatggaatcccgtgaagtatctttcaacaataaaggtaaatatcttttctggcaaacaccatttgtcactgatagacttgactaaagggaatacccaagggtatttatcaggcagtaggaagattgtgtcaggtggaagcttggagatgcagggagagatgaagagtggaaaaaaacccatgaaaatatttctaaatgagtattaatgacataaaacaataataatatcttgtatgatctatccaatgatatagggaaaaaaccgaagtatttcttctattccctcactcagtagtcaacacagaagacttctgtaaccaaatatgtgggagttttctctgcacactaaccaagcaatcagttttgcagtggacaccagctggtgtcctccaattcaattctgatgctatcttcctggagagaacatcagatcccacaggttaaggtttcagtcccatgagattgcccccacttctatgccaatcaaaagccccactggcttctgacccatcagctgtaagtagggtttctcacaactcccttcttgggttcaactaatttgccggggaagctcccaaaactctggtaaacactttacttacatttactgggttattataaaagatattacaaaaaatacagatgaagagatgcattgggtaaggttatgtgggaagggatgtgggacttccatgccctcttatatgggccaccttccaggaacgtccatgtattcagctatctgaaagcccccagaaccctgtccttttgggtttttatggaagctccattacataggcatggtggattaaatcattggctattgataatcgactcaaccttcagcctcctcccctccccagaagatggggcatgagctgaaagtcccaatcctctaatgttgccttggtctttcctgtgaccaggccccatccggaagctacatagaggttgccagccatctgtcaactcattagcacacgaaataacatcactttggagattccatgaattttaggctttgtatgacaggaaatgggaacaaagaccaaacatatattttacaatatcacaacttagagtgtacataggattaaaatatacaacagtagcacagaaaaggggaagaagtaaatgaaattagtgttctaaggtcctggcattgtctgggaagaggctaaagtactgatttgttacagtttgataaaaacacatctaatctctagaaacaaagcagaactactgggcaaggcatgatggccatttggtggccgtgtggtgggagtctgcagaagttctcttctcgccactgcaatgaagaagaaagcaaagtcaaacagagtgaggaagggaagaggcatttagagtgtgaggtgagggtgtgaaacaggcaaccatagattctgattataaatggttaagtttagcctaaagctgccttcttacatattttaagttcagtctcaaggtttctctgtaaactttcacatagtgaactgtaacctaactggatgtgtaaacagactgtaacctactcttgtgccaatcactgactttcagccagtcacaggcagccaattatgctcaaataaggctaatgctgagctttaaccaatccagctgtttctgtacctcacttctgttttctgtatgtcactttgccttttctgtccattaatttctaccacatggctacactggagtctccctgaatctattctggttcaggggctgcctgaaccagaattgcatgaattgttctttgctcaattaaaatgtttaattggtcaaaggtttgtcttttaacaaagtcaaataaaatgaaatttggatgaagttgaaaaggatgtcaatagctgataagccaatatagcactctaggtcaagagtagggtgcaaatttttctgaaaaaataagttaggggttttggagtatcttttaatgagaacaaaaaagaggagttaagggacatcatttttttctctccaacttccttatcaagagaatcagtctggagctaagagggtgaagaagaaagagccactgctttgtggctttgagcagaggcagctgagcagagatgaacaaacactaatcaacaaaccaaagactcagggttcctctccaagtcctgccaaactcccgcctaggtggtctgcttatccctaaaccaggggatcctgaatgctgaggagaagtgcttccctaagggcagagggcatatggagtttttgagacaacaaacctgaaatgaaattctacccccaaaatatgtacattggttatgtagcaatacaaaaatttttttaaaaaactttaggctgtgctaatgcaagcgtccatctcctctctttattatatttgaaaaaactgtaagcacaaggagatgtgaatccattcagagaggagtaatcaacatgggctgtgtgcatagactatcaatcaaaaaggaagcattaaacatacagcacgaacaattcattgttcaactgtccctgcctccagatattccctaccttctcctgctggccaagttaaatgatattctttgcatttccatgtcccccatgcatatcttttcctaacttatcatactgttccaatttttttgtttacttggtcactgtttcactagattctaagatcctggaaggctggtgctgggatttttattccataccctcagtaatgaatacagcacttgagcatggcaggcatagataaaagttggaataaaagaggaaataatgtaattgatagctgtttagacaacatagggttaataaaaacaggacatggaatctttccttcattcactagattctcattccaaaagtgaattgaagaattaaggcaattctctaggtcaaggctctccagtagaaataaaaagtgagccacatatgtaatttaaaattttctagaatccacactaaaaagtacaaagaaatagataaaattaatctgaacaatatattttatttaacttatgttccaagtattattttaaaatataatagacgttaataattattaatattttacatattttttatagtactaaaattttgaaattgtgaattttccacttagagtacatttcaatttgggccctaaatttatatcagaagtatataatctgtagtttgcaattgtaaaatttatgattgaaaagtggatttcataccaggttgaaatatacttaagatttttccaacaattgagttaatgatgtttttaaattttaatttaaataaattaaagtgaaataaaactaaaaactcaatttctctgacacattagccatatttcaaggctagtagccacatgttgtattgaacagtacatttctaggtaatgcagatcccaagccatgggtgtgcagacaaagatgggtccttggcatagaattaatcaaccagtttccttttttgtttggtagtgtcattattttcatgaaccatattaaacacatttgttcattaaacctgcagactgtccagtcataaggaaaaaaatgggtcaaatacttgattttgcctgtggggctgaatttagtcactttgcctgctgcaagtgatgtacttttgtattttttaagctgtcctgtgtggacctggtgttttttaagcttgcagctgcactattgttaggtcaacaattagcacagtcttttgagttgcataacaaatatactagctcccaggaagcagatagtgccatgacaaacttactccaatttaggtggaatctcaattgatatgtcctgttctgtatttgtggtaagatagggccataaaataatgtggtactcttaaatgtatttttcaagaaatttttaagagagaataaagagattgaaattattctctttcatatcaatattttctgagaaaaggtccaaactggaaaactagaaaggtcttagaattgagccctgtgagtataactgcatttaagcattaatcaaactctaccactcttgataattctagatgtccacaaatggaaaatgcaaggaagtcacagataatttaaaaacaaagaggccaatatagaaaaagcctaaagctaatatcatacacaatgattaaaaatggaaagctttccctctaagatcaggagtaagacaaacatgcccatgcttgccatttctattcaacatggtattggaagtcctatgagagtagttaggcaagaaaaaaaaagtaaaatacatctgtattggaaaggaagaagtaaagttatttgtttgcagatgacactatcttatatatagaaaatcttaattccacaaaaaaacctcttgcaactaataaacaaattcagccaaattgcagaatacaaaatcaacatataaaaactagttgcacttttataataactaacaatgaataatctgaaaaggaaattaaaaaaaacaattccacttacaataacatgaaaaagaataaaacatttaaggaaaaaaccttaagcaaggaggtaaaagacttatacactgaaaactaaaaaacactgttgagggaaattaaagaagacacaaatacttggaaggacattctgtattcatgtattgcaagatttaaaattgttaaaatgtccatactacctaaagcattctacaaatgtaatgcaatccccatcaaaatcccaatggcatttttttttacaaaagtaaaaaaaaaatctgaaaattcatatggaaccacaaaggaccccaaatacccaaaacagtcttgagaaagagcaaagctagtggtgtcacacgtcttgatttcaaaacatattacaaagctacaacaataaaaacagtatgacatggatgtaaagacaggcacatagaccaagggaacagaatagaaagcccagagaataaacccatgtatatacggtcaaatcatcttcaatgagggtgccaagactgcacaatgggggaaaggataatctgtgtgacaaatggtgctgggaaaactgaatatccacattcaaaagaatgaaattagactcttaccttacaccatacacaaacatcagctcgaaatggattagagacttaaatgtaagacctgaaactataaaactcttagaaaaaaacatagggaaaagattcataacatttggcttggcaatgatttcttggatattatatcaaaaatacaggtaacaaaagcaaaaataggcagatgctaatacatcaaactacaaatcttctgtacagcaaaggaaacaatcaaagtgaaaaggcaatttatggaatggaagaaaatatttgctagtcatatttctgataagtgtttagtgtccaaaatatgtaagaaacttacaattcaatagcaaaacacccctgagtagcctgaataataagtgggcaaatgatttgaatagatatttcttcaaagaagacatatcagttaccaagaggtatatgaaaagatgctcaatatgcaaatgcaaatcaaaagcacaataaagcatcacctcatacctgttaggatgggcattattaaaaaaacagaaagcaataagggctggtgaggagaaattagaacccttgtacactgttgatgggaatgtaaaatggtgcagccactatggaaaataatatagaggttccacaaaaaattaaaaacagaattctatatgattcagcaatcctactgtgggtattcattcaaaataattgaaatcatgatttcaaagagatatctgcaatcacatgttcatagcagcatcatttacaaaagctaagaggtagaaacaagctaaatgcaaattgatggatgaataaataaagaaaatatggtatatacctaaatggaagattatttatctataaaaaagaaggaggtcctgtcatatactataacatggatgaagcttgaggacattttgctaagtaaaataagctaatcacagaaggacaaatcttgcatgattccacttaatatgaaatctctagtacaactcatagaaacagagagtagaattatggtttctaggagcttggagagggaagaaaggagttgctgttcaatgactatagagtttcattcatgcaagatgaaaacattctggagatctgctgtgcaacactgtgtttatactatactgtacacttaaaaatttgttaagagagatgtctaactatattattttgattaataatattgtacatttaaaaatttgttaagaggtagcttttatgtgctttttgcttaccctaaagcacagaatttaattttcatttattttttaaattttatttattatttattatttttatatttattttattatattattttacagatgaggtctcactatgttgcccgggctgggcttgaacttctggggtcaagtgatctgcctgccttggcctcccaaagtgataggattacaggtatgagccaatgtgcccggcagtggaattgctgaatcactgtgtaagtgtatgacaagctttgctagatatagctaaagagttttctaattgtcccaatttacactctcaccagccattatgagagttccagtcactccacatcttcaccaacacttgttgttttctgtttttcttttctcttttttttggctttttagccattcagctaagtgtatagcagaaaaccatggtggtttaatgggagggttgttctgactaggatttttgattaataagaggctttactcgacttgccttcagtagtgggagctttgctgtaaggaggcagatgcacaggtactgggtgctgggaaaactgaatagccacatgcaaaaactgaatatccacacgcaccatttgccattcctttcaatggcaaaaaccgcaattacttttgtgccaacctacatcggggcccaggcatgaggctttgctgtaagatgatcagccactctctctgtttgtcttcccttttatctcctttgtctctctctggcaaatttgctctatttctagttgaaatatgagaaggagactctggctcagcaaatctcctgatttcgggtcacaacataaattgtgtaatgtgcactggtggccttgtgcccagggccaggtcctttccagagaataatctagtgctgtttcctcaaagggacactgaggacatggtgggcccaggtggagaagatggtgggcaagagtgattttaaaaacaatggaaaggaaatgtatctttatctgagtggagtttgaatttgatgctagtgacaacaggaataatgacacaattatttttatatacacacacaacatatatatacacacacatacgtgtgtgtatattgctttgatcagaattggagaaactcagttaataaaatctttgatttgccattttttatctttgtttagtgaaaagtaggacattaataattacttcatgtctgatgtatagaccattaacaaaatatttcaagcagtagaattcatgggtgaaaataataagagagtctgttggttaaaaacaaaaggaatttatagctctattggaattaaaaaaaaggaatttatagctctattggaaaaaggagcgtggattatggccttagcagaagtgtttgtgaatattctgatatatacacaatcttttacctggataccttggtttttgattggacattttacattctataaagacacactgaagtcagataattggagactggatcatatagctagaacctaatcctcaggatttaaacctcaaaattcaaattatctttctttaaattcatgtttatttcttgaggagtccataacaagtagtcaaagaaatggactcttctaatttctagtatatgtagagtgattgggattttgagctgtaggaaacctaatagctggtaaacccaaccatggtacaatgtgactaaaatgttggagtgtttgagagtcaggagagtgagacatttggagaaacgtcatcgcttctccactctgatggattgctattgtgtatctgtcccacagatgtcctgaaaagggcctagggtcacactttgttccccagatgtttttatcactgtctcctttctttttctgcaggatgtcagtgtgggaggactgctctcttgtcatcttcctcttcctgcccccatgccatgctcaaggtctaactggttatttttacttgggacattaaaaccttgtgttctggttatctattgctgtgtaacaaatcaatccaaacctggtgtgataaaacagttaattgtgatgatttttatggttctggtggttgactgagtttagtggggcaattttctttcactcagggtgtcacatgaggttgcagtcagaaagtggctctggctgggatcatctcaaaggctttgttgctcacaggtctggtgtttgatgctcgttgtggtctcaggccttagttggggctgttgtttggaatacctacgtgtactttctccacataatctagcctttgtctaagtatggcagttgggttctaagagcaagtttctcaagagagagagccaggcagaagcagtaccaccttttatgatccagccttggaaggcacatagcatcactcttgttgtgttctattgggtgatgcaattacgaaggctcacctgggttcagggaaggggacatagtctccacatttggatgtaaacaaaagcctgtttattctgcaggcaagagatatcacaggccatcagggctcaaagtttggcttgctccgccacatcactcttctattttcaaggagtgggctggagggatttgtgaataaacttataaaaaagttagtctccattaagttatcctggcacactgactaaatgaattaaaatcatcttttggtggagtggagtgatacgattaaaggtaagtgttccagttgtctattgcagtgtcacaaactgcacacaaactcagttgcttaaaataatatcagttttcttgtataattttgtgggtcaggaatttgggcaggatcagcagagaaattcttttgctctccctttagtgttgactagaatcactctgatcttcagctagtggctgggtttgcctggagggtccaagatggcttcactcacgtgcctgtgccttggtaggcacgtctgaaagactcggctcagctggatctttctctttccacatggtctcggggcctaccctcaggtctctccagcagaccatatggacacatcgtaactcatcacttccatagtctactggctaatacagtcacaatgtgtacctaggttcaaggggacggggaaatactctactttttgatagggaaagggcaagaccacctttcaaaagagcatatggaataggaaacattgttgtgggtacttttggaaaataaaatctaccattttaggtaacaaaaaagttacaaagtagaaaagaaaaactgtgacttaaatactagtattagtggctctagacaaagtatgactccaagtgacaaggtaatttgctaaattaaaggaattagggctgcttagttccttacttttagtctgatcttattttatttctttagcttatttattgataagctaaggtattgggcatctgttatgttttgtctgaaaaacttacttcattttaggattccaagctgcagaatttgactcaatggtttacctaaaagttttgcttattttgtttagttttgacaagaaggggagttttatccatctatccatccatccatcccttccttcatccattgatttggtatttatttagtgtcttgtatgtactagacaccgttttaggtgctgtagttacagcatcatctagtacaaagtccatgagcttatggaattaacattctccatatttctggattggaaagtagctcagaatgaggcaaagcgacagttatgactaatgagaattgggaatagaaaaagaatgtctctaagactgtaatggtatgagcagaaatatttctctcttaaccagcacataaacacattaggggaagcccgtttctttttatacatgtgggaaaaataaaatctattggtgaatgctcagaaaaactcttctggaagcctggagtgactttacatttaccaagaggctgtaaatgaaattgctgtgttcactgggtcagaaaagagaaaacaggccagaaacttgttcttatgagactaggtgattatttttgtttgtttgtttgtttcaatagtttctatattttccaggacagggtatatacattttgcatgtgggcaaattctgtgaaatatttcttatattggataaatcaaacaggccaatggaggctcataaccttaggaacttctagccatcataagggtaagacctaagcaaataatttcccagcaagaatacaattctcaagaagaaacgaattatttactatggattcattgcagcctcccactcaagacagcacagggtcataatttgtgattaaccaataactctaatactatttaataagtatattatttttatgtaatgccttaatgtgaattttaaacaatatacatttgcacattgtgtagttaacttgcataatttataataaatttgaatactatatttcctattttaaaatatatttttttatttcaatagctttaggggtacaaatggtttctgcttacatcagtaaattgtgtagtggtgaagtttgggccttttgtgtctccactgctggaacggtatgcagtgtacccaacaggtgaatttcttatccctcgttcctctttcaccctccccctttctgagtctccagcatagatgactattcctatcaatctaggtgaccttgggtcctttttattcacccagatactggggaccttggaatatgagatgcttctgattttatgttatactacactaattttagaaacttcagaaaagtataaaagaggaaggtaaaaatgattcctactttcactatccaaagattacctctacaaatacttggcatattttctgtttcttttaacaagacatacccacggccaaagccatgtatctaagaaaagtgggatcacatgctataagcgattccgagtcctgcttttttcacttaacactataaaagtatgcatttgcctatgttagtaaatgcctctgaaatcatgaatttttaatggctgtgtaagactccattgtatgaatataccaaccaccatttggatatttgcatcatttcttttgttattaatactgccataataaacatctgtgtgcattgatgtttgtgtgtacctctgatattttttcccttaggataaactcataaaaggggaacttcttggttaaagatacaaacttaaatgtgagcaacttgatcttctccaggaagatgaaaaaaggggatttgaatttatactaaattagtcctaaaatggcatttgatagttgcatggatgagagtgttgtcttgttgccgggaatattatagtaggttcttacacaatttcttaatgaggggatacctcaatgatagtgttcttgaagctgcttgaaattagttcagaaacaaagtcctcagtcaaactagagattatttgttttgtgtttttgtttctttttatgatttgcttttcagttcccaagtcagagcaagacaagcagacatgtgaattggaggctgaatccatcacttacagctgctcttgataaaagaagagcagttccaagtgctttcctgctggcagctgcctccttgctggctatcattcctttccctgtatcatctcgcgtgtctcattttgtccaaagtgcagagccaagagggcatctgctctgaagcttgaggcccgctcaccttatctctccagcactgcaacccaccaagagggaggcttttctgttcctttccccctatcctccagcctccggcccccaaccttttagcagtttataacaagttgctctcttgtatacagaaaaaacaggccctcaacaggatctgagtgtgctgtttggaactgtttatgacttattttggactctccaggcgaggccataaatacacagttaatctgcctgatagcaagaacagtcaccttggccccaagagattaaccacatgtggaaacacagagaccccatcctttctgcaccagccatgcagtgcagctgtctataaacctggccctctgtggagtggatgtggggactggtgccccagctgctcccttaggtcatttcctttccctgcaccatctttcaaacacctagtgccatcctcaatccttccttgcctctgaaaaatgtctagcagttgcttaagccattgggttgtctcttttaacttaactttggaatttcatctttatcattgtgccttcaaagccttgccacctcttatttggtcatttagggctgcactaacccacaaggtagccactagccacatgtggctatttaaacttaaataaatttaaaaaaaccaaagtaaaaaaaaattaagcttctcagtcacactaaccacatgtcaagtgctcagcccccacatgtggctagtggctcctgcagtggatgatgcagacatggaacatttctgtcatcacaaaaggttcttccactagacagagctgattcatgacatcaacactaaggaaggctgaggtagggaaataatgacctctctgctttgtatttgggactttttgccagtctgagcatggaaaaaaatataatggtagctgacattttctcagcttttatcatatgccaggcaatgcactgagaagcttttgggcttgttgaaatcccaaaataagcccacaaagtggagattatcattctacctattttacaggtgagaataagaaaagctgagcaactctctcaagatcatacagctggatttggggcctcttccgtcttcctcccagcctcactccctgccaacactgtgagaagcctcctgtctgggctgccactctgagaccccagagccctttggggatttctgacactctgcaggtcccttgcagtgagattgtgaggctggggggctgctctgatctggtgttaggcatcaggttgtgtactcccagatccagtggtacctagaagacttaagtctgtaaacctctataatttcagttttctggtctttcgaatagacaaaagcaaggagttcactgaatgtcatcctgaaggggggggggatgagtgcagagggtctccacatttttccagtttaagaattaacttggttcccagcactttgggaggccaaggcgggtggatcacttgaggtcaggagttcgagactagcctggccaacatggtgaaaccccgtctctactaaaaatacaaaaattagccatgcatggtggcagatgcctgtaatcccagctacttaggaggctgagtcaagagaattgcttgaacccaggaggcagaggttgcagtgagctgagatagtgccactgcactccagcctgggtgacagagtgagactccatcttaaaaaaaaattaacttggaaactcatgcctcagaaagcatgactccagccaccctgaatacccttagtgtacagatatgctttgagtggtcacatagagagggcacaggggcaccaaaggaagggaggaatcaggagtccccatggaggttctatagaggaatccaaattatgtctccaggagcttcttctataaccagttgctgtctcttccccctgccccaaatttagtaagatataattgacaaaaattatatatatttatggtgtacaagctaattattatataacatatgcatcgtctcacgtacttatcatttttggtggtgagaacatttaagctctactctcttagcagtttttaagtatacaatacattattattactacagtcagtatgctgtacaataggtgtccagaacttatttatcctgcataactgacactttgtaccaattgactgatatctcctaattccatcgccttcccccaaccccttgacaaccaccattcccctcttcttcggtgcatttggcttttttagattccacatataaatgagatcatgtaatacttgtctttctgtgcttggcttatttcatttagcataatgtcctcaggttcatctatgttgttaaaaatataagattttaatctttttaaggcttagtagtattccattgtgtatatggactgcattttctttattcacctattgagggacacttgggttgattccatgtcttggctcttgtgaatagtgctgtagtgagcatgggagtgctgatatctctttgacatactgacttcatttcctttggatatatacccagaagtgggattgccagatcatatggtacttccatttttaattttttgaggaacctccatactgttcttcataatggccttactaacttacatttcaatgagcaggaaccagtctttctcttgtacagtttcagtcatcgccctcactgtcccatctcttgcctcctccctttaggatgtctgtgggcactgaagttttctcttcagactggatatgagccagcatcccagcactttgtgagttgagtgtcaggacaaggtgcgacttgattctcccagaaatctttcttgttttagagatagcctcctgggccagggactcttaaggaccaaagttcaattcccaccactccccattacactgggaacttcagaatgtgtgagttccacgtttcccggtgctgacagatcagaggaggaccagacgcgacaacatggctgctgctggaggggctgagaggtgactgattagcttaagcctgcacagcccgtggaggaagcacctcgttcctgccttctcaagtgataaagtctatgctggaatacagagctccctgctctgagcacctaaagtcttgatttttctgggggaaaactctctgtagctctttcttctagtattatttgtgttagtgagtaactccttaaccaggttgtgagctcctggagagttgagagtgtgttttggtctttgtatctatgaagtgctgggttatgcctttactccagggccatgattgaaaaaaaatgttagagggagaaaattgcaagatgatcaccacattttgtccaattgaaaaggaatgtgccaaccagtttatacagttccatttatttttggaaaaaatatatctccatattacctgcttcctgccttcctttaacttctctctctcttttaatcaaaataaggaaaaaaaaaccacagaatgctatccacaatatgttaactgttggttatctccagatgttgggattatgcctcaaacaacaattctgagtaacttaaataaatatggaatgttctggaagctgtggggtaggatacagagttgagggaaagcccaagacccagaaattagaaggtcagtgttaaaaacatctctcagatgtgggtagtgagaaataaaggagagcccttcgtgcagggggtcatcagctccaagcattttctcatctttatacatctcccttcaagattcagaaccctaggaggagtctgattgacctagcatgggttatacgaccagccttggcgagaggagggcaggattctttaaataatgggaaacctgtgctattaccaaagatagggagaggagaactgcgaaggcaaaatacagatgaccatcacgaacaaggggtacttttcttttctatctgtggtttctaatgtttttgctacaaacaaaatacaaaaaatatttaagaaatatttatgtattatatatataatatatatatttataaatgttataataaacattttaacatttgtccttttaatagtaagaagaaaagatagcagcaacaccattaagaggaagctagttcactggaagggattcagaggtgaacatttgggaaagtaaacggacaggaagccatgcaaaataggctcttggtaggagcctgggatgttttagttggtgaatgaggatactcaggtgcatatgagagctcttttttaccacttgagggaacagtatctggatgtggtgggcagtattctgcagggttccaggagtgagagtgctgggcccaggggtgcttctaaagagggttgctgctcaatggcaggagaggcagcctcaagtgctctcataggacctcacccagggtgtccacggagggactcagtgactcatgctgcagtggcttcactggatgagaggattctgacatcctttccaaccctaattcctaggattccaggactcattattggcagtgcatgggtttgtggggaagaaggcaggacaatttgctgaaagtccattaaagcccactttctggataaccgggaggaggtataagaatgcagttgcaataattttacatattcaaaaatatgtccacgaatatattacagattcttatgtctcaggacccttcttttctgccccatcgctggtcccctagtcctctccttctctttgtcttttagccctcaactatagtcgtggagagatggagcaaagaaatggaatatcctttaaaacaataatatgaagacaacatgaaaatgtatcaaatatagctaggtataaaaaaccaggtaaacgcagagaattgctcatttggtgacttggcaatcagagaatttgcttgtgatgaattgaatttcaatgaagcgatttagagccattttgggattgtttttttacggacatggggatttgaacagaagttcctgattctctcaccctcagagagctgacgcacactggcctatctggggacatgtcatctttgagtatctccctcctagggtaggtgggggatttctggaaaacagcaggccttggggtgccctgagtgtgatgttctggatattccagatgaatcattgctgattcaatttggggctgccttggaaggactttgaaggccagctatgccccagtcaggagaactcctgaatcagtcacagttactttgaataattcctggggttcatgtacagatgctgtgctgagcctcttagatccaccttcatggacaagacacttatgcccacatcagctgaaagtgctgccttaagataaccaacagcagacaggattctttgggaattgccctggctgaacagaatggccttgtccaaggccacacccccttcccaggtgacccatgtcgaatactgaaatagaggcaagaaggccccatcctgttgctacaactcgacaactccaatcccagctcaggttttctacagtccctttgcgccatcctggagtctctgaaattcttcatgctatgtcatctgcctcacccagaatacactgtactcaactattacacttttatgcacacataattacctttaaatatttgtatgtttctcaaggcaaggagctatgtccaatattcatttgtatgtgtacaagtggtttgcacatattaggtgtcaataaatatgagtcaaccattctattgcttctaataataattgctaacagtttttgaggcttactatgtgccaggcactgaacaaacagctttgcatactgagtttcagtcaatcctatgtatatccatgggatgtatggtatcattatgatgattttaccagtaagaagacctaggcttagcaaagtgcaggggcatgaccagtggcatggtaattggtgactttggaataatcatcatatcttccttgtgtgtacatagttcacttacttttttcagagctcttcagtatttaatttttcatgatgtttttcttacatctatgtgagtgaacaattttacagatggagaaataaaggtttatgccatccaagccctaataaaagtcacataaggtttggtgaaggtcgcagaagggtggctgatgtaggatcaaggctaatagtccgttttgaatctggtggcctttttgacaaaggctgggcatgggctcagttggcaactgggtagactggagatgcaccagaaaatcttgtggctccagaaacagttgcaggctgccaaactcctggattgttttctatccatgttgctgcaaaggacatgatttaattcttttttatggctgtgtagtattccatggttgtaattgtttggtgttttagattctttatgtacaaagcagtttaaagacaaagcaatttaaagactcattcttttgcttgagaaactcagatcttgtagacagtttgttccccaaggtctcatcaggaaagtagtttctgggacagccccatttggagtcattttacatcggcacatcagcacatcatccaatagaaagtaaagccagcacaaaagatgcatgggagaaatacgaaattattctaaaaacacaactaattggttatgactaagaaaggactttaaaatcctttccttaaaataactgaagatgtggttagtcaaaattagcaataatctttatattttgactctgcttatgttggaaaagaccacaaatctgtcaccggaacttctcatacacaaacctacaaaactatggcccaaggaaaaagtatgtccacattgtatttgaaaattttacatcaatactcctctaaagatttacagaaattgtatcttatttcttagtaattcttctagaggctatatcactaccctccaagtatgtttactgcttaaaaataaacagtgtagacaggaaactgatgtgggataaacatgatccttatgttttactcctgcatttcagaagggtcaaggtcttcatgtgacttcatgctgcacactgtcagtagttgagtttggctgttccttcctctgcattttgaggcagcatggaaataggatgaacagaacatgggtattaagtacgggacttttgagcttgatcagtgaccggctggcctgccgtgataaacaggtacattttgtcatttagagcatgaatgatacagatgagcttatcttcacatagggaagtatatacaatataagacaaaggccagatttcagcagctgcttgatctttctttgaggtttggtcaaccaagagcagttggggctttcctctctttcttaatagggcaagaggcatccacatcacagaaagacccttcaacagacaaggtttttgaagatcccatctacctctcaccactgattaggcattatgcatcttattagacaactgtgcattacagtcattccttggtcatgcaagatatcgatgcctatgatgggtcaggatatcacatgaataagtatggctgtaaaagactgtacatagttcctttggtctgaaaatgaggaccttcttaatgttgatttttcatttttttcttctctccatactgtcctctgtcctctctcttccttttcctcttggtgtttcagattctttttttttttctttccaactttaattttagattcaaggagtaaatgtacagatttgttaaacatgagtcagttgcaaattacaggggtttggtgtacagataattttgtcacccagataatcagcataatatctgataggcagtttttgggattctcacctgcctcccaccctccaccctcaggtaggtcccggtgtctgttgttcccttctttgtatccatgtgtactcatatttagcttccaccatgagaacatgcagtatttgattttctgttactgtgttagttcgcttaggataatgctctccagttccatccatgttgctgcaaaggacatgatttaattcttttttatggctgtgtagtattccatggttgtatatgtttggtgtttcagtttctttatgtactatggacaaagcagtttaaagacccattcttttgcttgagaaactcagatcatggtaggcagtttgttccccaaggtctcaccaggaaacttcttgagtatttcaaacagggagactttagtgacacaggaaataatgatagcagagaattgcagacacaagtgatggatgaactgagaaaccaaacaggaaccagtaaagccatcagagatcggaaaaaacaggaaacccttaccatcccttgtcaggcaggagggaatgagggagttagcttgaaaggatcagctcgtctaagttgggatctcagagggtctgttcagcaaaagcaggaatcacattgggacttatctgggttggagataatgtccaaggcaggtaagaagaacctggcttctttgtcccttctgcctttgaatttcctgccactatttgttggacaaacccaacaaggattctgttgtggatattacttacctgctggcatggccctgggtctatttgccttccagatccctcattcagcaattcctttctctgttctgaatctcgggggctaacagagcctaggaaatgcagcctgcgggggccaggcagcccctgcagttcagaacagggagagggaagtctgaggactggaggagggagtaaagagggtcagggccatcacagcaggtactcagcatccacagtggaatcctcatgtgagtgttctttctctaattctttatccttatacttcctgcttcccttagagtccagatcattgtcactccttctggaaatctttctcttgaccctgctaatctggagtctgcctctctgtgcccctaatttcctgggcacacttctattagggctgggctacattaaaatataattgacaatatactgctttgtttttttctatcagccaaaaaatctccttgctggcatttcttatccatccttctatcccgagtcactagtaaccccctcctttagtaggaggccagtaaacaaatgaagacatgcctgaatctcactgagacgatatgcaagatgtaacagctatcttcacatgctaattatttgatttgtaaaatgcaaaaattgcacgttcaaaaaacggtttgattaacttttgcccttctttgaaaatatacaaatagttttatttttagagccaaacctaaactccataggtgcggagctggatatcctttatcattccttttggatactaaatgtgtgtctttggcagatagaaactgttgacagaatgctggaaagggaaccagagatgacagaagtgtgaaataaatggtcttgggggctgaaaattgatcttctgaatgctcccttctcttatactgatggttatctactggaataatataccaatttgtcttttggtctttttccccctttatcccaccataaactgagcattagacagaaaataagaaactggtttgaatttaaccattggactggaagagtgtgtgatcttcatgtttgagaagaatggacttcatccccttggtccctttcatttccaatatttgctctcttctctactgagtttgatttgatgactttttctgtgagtcagatggcatcttttctggctgaagtatcttggtttccatatctctcttgggagcatgaggaatgggttgacataatgtgtcaaacatttctttcaaatctttgtagaagttgtctattcatgaagtaagtagtagcttatatcatgaactttttaaaattcaattagaatttcttgaaatatgtaatgcatacacaggcatagaatttttaaggcaagaaatgttttatgttttattaatacatataataaagtatgtaaatattttattttagatttcaagtaatcttcgcccattctagtttttcaatcccctagttttcctctccaaaatcaatgactgttacttgtttcttgtgcatctttgtagttattctatgcttataaaagcaaagtatatcccctcaacacatatttaatacaaccagaacatactgcacgtgctgtttgcactcgccacttgcatttttaaacttaacatttcacatcctataaatccaagcataccagggaagttctttcaccttaaacttcctaaatggacctatttcttatccttggaagttatatttctgttggataataaattttttccatcgataaatactgcaacactaaagagatgacacattaaacatctttagggatttaaaacttggtatgaattagttaatggcctagctttctaatctgctaatgaggggtgattgatggaggcattagagattttgaattttggaagagaaagattgcagtgactaggaagcaaaggtgctgagagaaacattttcccactctaatttgttgagtgccctttcaaagtgtaaacaactcagaagaaatcaagtcatggaaggaagagggccaaggagagcaatacttgaatcaatattgcaacaccaaagtgattgtcaaggacaaacatattctaactctgggagataagggttgttctataaaatgctgttaagactagcttaaaagcatattaacaggaatggagaaatttattcaaggaatttattcaaacatcacagatgtgctcaaaactcagctataaggatgcttgtgatgaaatagtgaaaaaaattaaatcaatgttcaacaatgagaaaatggttgtacaaatgatgctatgtccatataatgatcttgccaatttttaatgacatggagaaggtttcaaatataatgttaagtgaaaaaattagcatgtaacatatgaaatatattcactatcaatatatgaggatatatgtttagaaaaagcatatatttatatataaaataaatctgcattctagaattatgggtaacttaaattttcttttctgcttgcccatgttttctaaattttctacagtagacaacaataattttgaaaaatgtaaaaatcatgagctgagacgcatgtgaaatagtttataatgtcagtttcaaccctatttctacttctgctttggcatatgtgctgcttaaaattatttatggaaatataatatgaaatatggttaacaaaacaatacctattgtagatgcaatggaaacaagactcaagtaaatcgaatcttctttttaaaaatatgtatttatttatttatttttaaccccacccaagccagaattttgaacttcttttatgagaattcttttcagcatcaattttttttttctcaacttggaaaatactatttaccccacagagatgggtcatcaaatattgtgcccaggatatgtagcaaaatagagaatcacatgattctcactgctttttggaaatcataaatgtgatcagccagctaattacatttccattttacttgtttgagattgagctcctgtgagagaatggtagtatttcctcccttccccttccccttcccttccttcttttttcttttttctcttcctctctttttcattcttcaggtattttcaaaacatggtaccttttatggctcgaaggcatgtttgtggcgggtgttggcaggttccctgtttatgtttgactctgctgatccacacagcaaggaaggcagctatatttacctttgtggctatcagatgtctgagaacttagatgatagaggtgactttctagcaaccacagtcctttaatttaagtcctcacacaacacctgttaaggaagcatgaagaaaaattacttcccctaccaaacagacaaactaaattcgaactcacaaagtttcaacaaagcaaagatattattcggtaaaatagaaacaacaacgaatgaataatacaacaacatgagaactacagcaacaaaaataaatatatgaatgagttttatgaaaagtgaatttacatccagtgcagtaaatgatttgggaacttttccagttatttgttgtcaacataatgctgcaaaacaaacaatcacaaaacttttatacaacaaacaacacaacatacagtgccatgcaacaataaacatatattttcctcttgtgtctgtggaacacctgggtgattggtttgagtgattttgtctgggtttactcatgcatttgcagtcagctggcagtttgattctgctccacatggtctctcattctccagtaggttaatctgggattactctcatagtggaagcagaggtccaagggatagtagaagtgtgcaaggcctctttaggtctaggtttggaactgacaaagtgtaatttctggcatattctattggctaaagcaaatcacaaggcaagtgcagattcgaagggtggggaaatagacttcacctcaatgggtgttgatgcaaagacatattacacagggcatggatctggaaagggtagagaatgatgccatttttgtactcaatatgcacagggattttacattctgaaaaataaaatgttgccacttgataacactactgaattttggctcctcttcattaataaattggatactttgatatgatattttcatagtctttcagttgatgttccacaatttgcaatcataacgtctatttgtagttcttagaaaagacaagaataagtgagtaagaggaagaattgccttaatttcccaacagaactttatgctttggttacacatgtgatggtgtttgaagctaaaatgattttagctttatgtctgactttgagtaaaattaagagaaatgtttacacacatagaataaagcaaagaaagaatctaagatttcgaatggctcaattttatcagtgaagacatggggatctagccctgtaagagaccatgtccataaatttatttttcaaaaacgcaacatacaaaaccacacaaaaaaacctcttagaaatacaagaaaataatgattagaaacaaaattatggagatttacagataaaattaaactaaaagtgaggatataaaggatttgaagcctatagtcaacaaaataaatttaatagatacagagatatatagaaaactttgtgtcctaccttgcaaacagaaattgctttctctaaaacacaagaaagactttgttgttgttttgaatttagaatgcagaatgattaaatcaagccaactaacatatccatcacctcacttattgttttttgtggtgagacagttgaagtttactcttttagctattttaaaatataccatacattattactgaccatagtcaccctactgtgcgatagatctcaaaactcatttctcctgtttgtctgaaacttgtaccctttgaccaactccctattccattcctccccgacccatactcctaagcctctggtaaccaccattctactttctactctataaatttaagtttttaaaattccacagataagtgagatcatgtactatttgtctttctgtgcctggcttatttcacgtagcatactatccttcaggttcaacctcattgttgcaaatgacagaattttgtttttaaaggctgaatagtatttcattgtatatatagtacatgttaaattcattcatctgttgatggacacttacattaattccatttcttgtctattgtgaataatgctgcagtgaacatgggaatgcagatatctctttgacatatgggtttcaattcctttggaaatatacccagaaattggatggttggattatatagtaattctatttttagtttttttgagcaacctccatactattttccataatggttgtattaatttaaatttactaatttaacattactaatttaaacattttaaaacatgattatttgaaagcccctttttgatttagctgtataatctctagttcttcctggatgagtttttctatttgttccatccctgaatatttctaatgatgttggttttcctttgtgcatggtagtgggttttcttcatgcactttgttatttttatgaacaagctcatttttggtgggagatattttacccaagagttttctgagtgccttaagcagacatctctaggatggtttcaccatagcttctgctgggaatctgttgggttcaatggctccaaattaattctttattttttattttcaggcagaatctcactctgttgcccaggctggagtacagtggtgcaaacacggctctttgcatccttcaactctggctcaagtgattcttgattcctcctgcctcagcctcccgaatagctatgactacaggcatgtgccatcaagcccagctaattttttaaacactgtttggagagatggggtctccctgtgttgcccaggctgatctcaaacttctgggctcaagcaaacccctcacctcagcctcccaaattgttgggaattacaggcataaaccattgcacctggcctcaaattagtttttatactagtgttttcacttgcatcttatgtaccatttaggtgtgctatgtatgtggcttgcctgagggctttgacactctttctggtgacttttttcgcactatagcctggggtatgtggttcacttctgcactataactctagacatggtagagttttcttagattcggttgaaggatgggatgtcttccatggctcctggctttatgactaaaactctgaaacattttgttagcctgcatgtcctcccaaaaggcctcatggttttaactcttgctcagccctgtggctttggatatgagttttctcctcatttatggcatctgaattttccctctctttttgttagactcagctatgaatttccattttcattaacaagtattttacacatttggagcagaacagggcttctggtatcaagtctgtgcttactggacagaaattccattgatcaaacactaacaaagaatgttgttagccacaaacatgatatataagtaacaacatttcaggaagtaatgacagctgtgaagataagtaagacaagtaaaaagctaaacaattggcatttattttaaaggaaggtcatggaaaacttctctaaggtaatctttgaacagaggactgactgaggcaaaggagtgagccacgtgaagatcttgggatgaacattccaagctgagtgagaacctgaggttggtgtaagcttggtgtgtttagggaacagcaagacattccagcatccccagagcagcatgaacaaagtggagagtggtacgagataaagtcataaaaatgctactcatatggagcctttgtaggccatgagtgttgggaatttggattttattcttgtgtgatgggaaacccttggagtgtttaagagaagtcacaaaattctatttatgttgatatagggcattcttgttgctgtttggcgaggacactgtaggaagataaactggagatacggagatttattccaagattaatccaggcaagaggtttttgtggttgggaacagggtggtagcagtggaggtgatgaaaagtgtccagatttaagatgcattttgaaaggaaagatgacaagacatgtatgtgtaaaggaaaaagaaccattaagaataagtctgatttttgccctgagcaactgggtaactgatagtatcatttgctgaacttgggagggtaaaggatttagacttcagtgtgaagcatgatatatttgagatgtctgctaaacatctgagtagagatatccagtaggcagttcaatataccagtctggcattcaggagagagactggggcttaagagctatgtttagaagccatcagtgaaataatacagcactcaaagatggaagattagaggcttttaatgtgcctcaaccacttggaaatagcaagatagtacagtaagatcaactctgtgacctttaatttaagaaggaatatgaaaatccaccagaattgtgaaggacaccccagatcccaggaaggagaatgccggcaaacaaccctagtgatgtcatcttgctgataaaagtgagagaagccccattatgtgagagaggcagagagcctctctctgtgactcacctttctattgggaatctgaacaacccaggctgagggggagtattttgtttgtcccaagctctggaggttacttggggagggacatggagatgctctgagggaaaaacactgggaaaagctacagacattttcccagtcctgagaccaagagcaggacacaatttttaatccaggtacatacaaaatcagccattctttggtgacccaccggcatggccacacaagcatattagtctcaggccagagattggagggcctgctctggagtggcataagggcctttcagagccagaactgtggaaagtgcctcagcagttggcactgaagttgtgctcttccctatcaaaagccgggggtgcgagaagagctgctacagctgcagtttctcctgggaggtaagacttgtagccagggccagctttgcactctgcaaccagtctgtgtgtgccattgctgggtatcccaccttgttctcccgagattgtggtacagcagtttcctctcttctacactcccaggtggaaacctaggcatttagagtgcctgattgcctggaccagcagcctgagatgccccaccaatcctggacatagattgtggtgcagcagctccatgcccagacagatctccaggcatttagagcaccaaccggcttgcccgaattaacagcctgagatgccccacccatcctgtgcagagatcctggtacaacagggctctttctgcttcacacccaggcagatctccaggcatttggagcacccgtttgctttgttcagaaacttgagccacctcacccttcctgtgaagacactgtgcagggaggccctctctgcttcacacccaggcagacctccaggcattcagagcactcactcatcaggttcagcagtctgagttgtcctacccttcatagtcctagatcttggtgcaacaggaccctgtctactccatgcccaaaagagctccaggcatttggagcacctgtttgcctgattcagcatcctgagaaaccccacccttcctggagataaatttcagtatatcaagcccctctccacttcacgcccaggcagatattcaggaattcagaggaccagcttgcctggattagcagccatcttgtgcagagatcctggtacagggagacctcctctgattcatgtccaggcagatctccaggcattcagagtaaccactcatctagttcagcagcttgaccaaccccacccttcctgtgcagagatactggtgaagtaggaccctctgctcccatgcccaggcagatcttcaggcatccagagcactcaccctcctggattaggagtttaggcttcccgcaatccccatgctgagtacttggggcgtaggaggtctccaaactccatgcctatgcacatctctggatgcttggtggcctcccactaaattatccctcagtgtaagtgcttgtaactgctaatgaggaacctgtaagtggacctgccttgtctagctctgcttatcatggctcccaccatccttggagctgagaagagagctcagatcactgtgaattccacaagggagcccattgcctgaggcaacagagagcttctgccagtaaaaaaaaaatcaagcatttacccagatgtgttggccatacctggctcttacttataagcacaatttactggcttgtaggttgaactgcacagcccaatgtaaaacttgctgaaaaaactgcatagggctatagaagcaaagccaaaagatgctacccagcattctctacagttatacccactaaggaggtggaaaaaagggaaagggaaggaaaaaccccaattatattataggaaaagaaagaaaagaaaaaactactacccacacacaaatacttataaaaattagtgccagtgtctccagatgagaagaaacaagtgcaaagaatatggcaccatgaaaaacctgaatgtagtgacacaaccaaaggatatcactaactctctagcaatggtccctaaccaaaatggaaactcagaaataacacagataaagaattcaaaggattgcatggaagctcaatgagatccaagacaagttaaaaatcaatacaaataaacttctaaagaaatccaggaaataaaggaagagataaatatcttaagaagaaatcaatcagagctcctggaattgaaaaacctacttaagaactttaaaaatgtaattaaaatctttatcagtaggctggaccaagcagaagaaagaattttagagcttgaagactagtatttcaaactaacccagtcagacaaaaatacaggtttttttaaaataaaatttttgagaaatatgggattgcaaaaagcaaccaaacctatgaattactggcattcctgaaagagaaggagaaaaggcaacatatttgagaaaataaatcaagaaaaattttctaatctgttatcaaggtaaatatccaggtacaagaaatctggagaacacctgcaagatagtatgcaaaatgaacattaccaaggcatatagtcaccagactgtccaaggtcaatgctaaagaaaaaatattactggcagttagagaaaaaggtcaaatcctgtacaaagggaaccccatcatgctaacagcagatttctcatcataaaccttagaaactaagagatacggggggcttattttcagcattcttatagaaaataaatttcaaccaagaatttcataccctgccaaactaagcttcataagcaaaggagaaataaaatcttttctggatgagcaagcactaatggaatttgttaccagtaggccagccttataagagatcctcaatgtagttctaaacatagaaataacagaacaatacctgctaccacaaaaacacacttaattacatagcccatagacctaataaagcaaccacacaatagaaactacaaagcaaccagctaacagcttcacaataggctcaaaatctcacatataaatattaaccttgaatgtaaatggtctaaatgccacacttaaaaggcacagattggcaagttggatataaaaccaagacccatccatctgctgtcttcaagagacctatctcacagtaaagggttggagaaagatctatcatgcgaacagagaacgagaaagagtaagggtcattattcttatataaaataaaacagattttaaatcaacagtaaaaaaggacaaagaagggcattacatagtgataaaaggttcaatactacaagaagacctaactattttaaatatatatgcacccaacattgcagcacccagactcattaaaaaagtacttctagacctatgaaaagattttctgtctttcttttacaaaatactggtgatattacattacctactactgaatactgttagcaattataatggtatttgtgtatctaaacatagaaaagtttcagtaaaaatatggtataatcttacagaaccattgttgtatatgaagtcactgttgactaaaacatcattataaagtgcatgactatatataaaccagtaacatatttgtttattatcaagtattatgtactgtacatgaatgtatgtgctatacttttgtatgactggcagtgcagcagatttgtttgtttatagcagcgttatcacaaacagatgagtaatgcattgagtggcaactttacaatggctttctttgatgtcactaagtgatataaaaattttcacctccattatagtcttttgggaccaccatggtatatgcagttcatctttgaccaaaacatcattatgtggtgaatgaatgtaattgctagggttcttgcagttatttacaccataatctctattagggcaagaactttggttcccttctctatcatttaagaaaaggtataaaagaacattaccgcccttagagaaccattttgttttattattgtaattatcaaagaacgtctattgaacacaactggaacagtgttgctctgtggtcaagtagatgaatttaacctctgagaaagtagttcatgctatgcaattaacaaaaagagtggatggaatataaaaggataagctaagatttgtgcatagcatgtgtagattattcaataggtagcagagttgatgaagaacgaagaaggaaactgataaatggggaagcatagcatttggggaagccattgagcaagtaagatttttatttttaatagtgtgagtgattttgattaagatacaaaagtattttgggtctatcataccaaatatggtttaatatttgtgctcatagtgtttgtttttatctgggcctacagataggcaatgaaacgctttgaaaatgtagcacaggtaaataccatgaagtttgtttgaaaagttgtaatgcactataaagcagtactggaggttgccagcagatgcaaccatagattttggaaattcagattgagacttccttcttagtagaccatggtaatgtaacaagtttatgaaagcacaatttttttttctttttttttttttaattatactttaagttttagggtacatgtgcacattgtgcaggttagttacatatgtatacatgtgccatgctggtgcactgcacccactaacccgtcatctagcattaggtatatctcccgataccatccctcccccctccccccaccccacaacagtccccagagtgtgatattccccttcctgtgtccatgtgatctcattgttcaattcccacctatgagtgagaacatgcggtgtctggttttctgttcttgcgatagtttactgagaatgatgatttccaatttcatccatgtccctacaaaggacatgaactcatcgttctttatggctgcatagtattccatggtgtatatgtgccacattttcttaatccagtctatcattgttggacatttgggctggttccaagtctttgctattgtgaataatgccgcaataaacatacgtgtgcatgtgtctttatagcagcatgatttatagtcctttgggtatatgcccagtaatgggatggctgggtcaaatggtatttccagttctagatccctgaggaatcgccacactgacttccacaatggttgaactagtttacagtcccaccaacagtgtaaaagtgttcctatttctccacatcctctccagcacctgttgtttcctgactttttaatgattgccattctaactggtgtgagatggtatctcattgtggttttgatttgcatttctctgatggccagtgatgatgagcattttttcatgtgttttttggctgcataaatgtcttcttttgagaagtgtctgttcatgtcctttgcccactttctgatggggttgtttgtttttttcttgtaaatttgtttgagttcattgtagattctggatattagccctttgtcagatgagtaggtggtgaaaattttctcccattttgtaggttgccctgttcactctgatggtagtttcttttgctgtgcagaagctctttagtttagttacatcccatttgtcagttttgtcttttgttgccattgcttttggtgttttagacatgaagtccttgcccatgcctatgtcctgaatggtaatgcctaggttttcttctagggtttttatggttttaggtctaacgtttaagtctttaatccatcttgaattgatttttgtataaggtgtaaggaagggatccagtttcagctttctacatatggctagccaattttcccagcaccatttattaaatagggaatcctttccccattgcttgtttttctcaggtttgtcaaagatcagatagttgtagatatgcggcattatttctgagggctctgttctgttccattgatctatatctctgttttggtaccagtaccatgttgttttggttactgtagccttgtagtatagtttgaagtcaggtagtgtgatgcctccagctttgttcttttggcttaggattgacttggcgatgcgggttcttttttggttccatatgaactttaaagtagttttttccaattctgtgaagaaagtcattggtagcttgatggggatggcattgaatctgtaaattaccttgggcagtatggccattttcaccatattgattcttcctacccatgagcatggaatgttcttccatttgtttgtatcctcttttatttccttgagcagtggtttgtagttctctttgaagaggtccttcacatcccttgtaagttggattcctaggtattttattctctttgaagcaattgtgaatgggagttcactcatgatttggctctctgtttgtctgttgttggtgtataagaatgcttgtgatttttgtacattgattttgtatcctgagactttgctgaagttgcttatcagcttaaggagattttgggctgagacaatggggttttctagacatacaatcatgtcgtctgcaaacagggacaatttgacttcctcttttcctaattgaataccctttatttccttctcctgcctaattgccctggccagaatttccaacactatgttgaataggagtggtgagagagggcatccctgtcttgtgccagtttttaaagggaatgcttccagttttttcccattcagcatgatattggctgtgggtttgtcatagatagctcttattattttgaaatacatcccatcaatacctaatttattgagagtttttagcatgaagggttgttgaattttgtcaaaggctttttctgcatctattgagataatcatgtggtttttgtctttggctttgtttatatgctggattacatttattgatttgcgtatattgaaccagccttgcatcccagggatgaagcccacttgatcatggtggataagctttttgatgtgctgctggattcggtttgccagtattttattgaggatttttgcatcaatgttcatcaaggatattggtctaacattctctttttttgttgtgtctctgcctggctttggtgtcagaatgatgctggcctcataaaatgagttagggaggattccctttttctattgattggaatagtttcagaaggaatggtaccagttcctccttgtacctctggtagaattcagctgtgaatccatctggtcctggacttttttttggttggtaagctattgattattgccacaatttcagctcctgttattggtctattcagagattcaacttcttcctggtttagtcttgggagagtgtatgtgtccaggaatttacccatttcttctagattttctagtttatttgcgtagagttgtttgtagtattccctgatggtagtttgtatttctgtgggatcggtggtgatatcccctttatcattttttattgcgtctatttgattcttctctctttttttctttactagtcttgctagcagtctatcaattttgttgatcctttcaaaaaaccagctcctggattcattaattttttgaagggttttttgtgtctctatttccttcagttctgctctgattttagttatttcttgccttctgctagcttttgaatgtgtttgctcttgcttttctagttcttttaattgtgatgttagggtgtcaattttggatctttcctgctttctcttgtgggcatttagtgctataaatttccctctacacactgctttgaatgcgtcccagagattctggtatgttgtgtctttgttctcgttggtttcaaagaacaactttatttctgccttcatttcattatgtacccagtagtcattcaggagcaggttgttcagtttccacgtagttgagtggttttgagtgagattcttaatcctgagttctagtttgattgcactgtggtctgagagatagtttgttataatttctattcttttacatttgctgaggagagctttacttccaagtatgtggtcaattttggaataggtgtggtgtggtgctgaaaaaaatgtatattctgttgagttggggtggagagttctgtagatgtctattaggtccgcttggtgcagagctgagttcaattcctgggtatccttgttgactttctgtctcattgatctgtctaatgttgacagtggggtgttaaagtctcccattattaatgtgtgggagtctaagtctctttgtaggtcactcaggacttgctttatgaacctgggtgctcctgtgttgggtgcatatatatttaggatagttagctcttcttgttgaattgatccctttaccattatgtaatggccttgtctcttttgatctttgttggtttaagtctgttttatcagagactaggattgcaacccgtcctttttttgttttccatttgcttggtagatcttcctccatccttttattttgagcctatgtgtgtctctgcacgtgagatgggtttcctgaatacagcacactgatgggtcttgactctttatccaatttgccagtctgtgtcttttaattggagcatttagtccatttacatttaaagttaatattgttatgtgtgaatttgatcttgtcattatgatgttagctggttattttgctcgttagttgatgcagtttcttcctagtctcgacggtctttacattttggcatgattttgcagcagctggtaccggttgttcctttccatgtttagcgcttccttcaggggctcttgtaaggcaggcctggtggtgacaaaatctctcagcattcgcttgtctgtaaagtattttatttctccttcacttatcaagcttagtttggctggatatgaaattctgggttgaaaattcttttctttaagaatgttgaatattggcccccactctcttctggcttgtagggtttctgccaagagatctgctgttagtctgatgggcttccctttgagggtaacccgacctttctctctggctgcccttaacattttttccttcatttcaactttggtgaatctgacaattatgtgtcttggagttgctcttctcgaggagtatctttgtggcgttctctgtatttcctgaatctagcaaggcctgccttgctagattggggaagttctcctggataatatcctgcagagtgttttccaacttggttccattctccccatcactttcaggtaccccaatcagacgtagatttggtcttttcacgtagtcccatacttcttggaggctttgctcatttctttttattcttttttctctaaacttcccttctcgcttcatttcattcatttcatcttccatcgctgataccctttcttccagttgatcgcatcggctcctgaggcttctacattctttgcgtagttcttgagccttggttttcagctccatcagctcctttaagcacttctctgtattggttattctagttatacagtcttctaaatttttttcgaagttttcaacttctttgcctttggtttaaatgtcctcccgtagctcagagtaatttgatcatctgaagccttcttctctcagctcgtcaaagtcattctccatccagctttgttccgttgctggtgaggaactgcgttcctttggaggaggagaggcactctgctttttagagtttccagtttttctgttctgttttttccccatctttgtggttttatctacttttggtctttgatgatggtgatgtacagatgggtttttggtgtggatgtcctttctgtttgttagttttccttctaacagagaggaccctcagctgcaggtctgttggagtaccctgccgtgtgaggtgtcagtgtgcccctgctggggggtgcctcccagttaggctgctcgggggtcaggggtcagggacccacttgaggaggcagtctgcccgttctcagatctccagctgcgtgctgggagaaccactgctctcttcaaagctgtcagacagggacatttaagtctgcagaggttactgctgtctttttgtttgtctgtgccctgcccccagaggtggagcctacagaggcaggcaggcctccttgagctgtggtgggctccacccagttcgagcttcccggctgctttgtttacctaatcaagcctgggcaatggcgggcgcccctcccccagcctcgctgccgcccggcagctggatctcagactgctgtgctagcaaccagtgagactccgtgggcgtaggaccctccgagccaggtgtgggatacaatctcgcggtgcgccgctttccaagcccgtccgaaaagcgcagtattcgggtgggagtgacccgattttccaggtgccgtctgtcacccctttctttgactcagaaagggaactccctgaccccttgtgcttcccaagtgaggcaatgcctcgccctgcttcggctcgcgcacggtgcgcgcacccactgacctgcgcccactgtctggcactccctagtgagatgaacccggtacctcagatggaaatgcagaaatcacccgtcttctgcgtcgctcacgctgggagctgtagaccggagctgttcctattcggccatcttggctcctccctattttttttcttttaaataacaatttcctggacacatatcagccaaactaaagagtaacaaccaaagtaaacttgtaggtgtgagactgaagttttgttgttgctttttttttttttttgagacggagtcttgctcagttgcccaggatgcagtggcgggatctcggctcactgcaagctccgcctcccgggctcacgccattctcctgcctcagcctcctgagcagctgggactacagttgcccgccactatgcccggctaattttgtttgtatttttagtagaaatggggtttcaccgtgttagccaggatggtctcggtctcctgacctcgtgatctgcccgtctcggcctcccaaagtgctgggattacaggcgtgagccactgctcccagcctgttgttgcttctttaatggtaagtcttggaaaaaacatttctaaaatctcctaactataatgcaaatgtctagatatagaaaataaccctttacagacccatcaaataatcatgagtgttgtacgtagtgaagcagaaaggtggtattgagcaatttaagtgcaacaccattatcatgggtaacattgcttctttttaaaagtttttatgtaagtgtttttttgttgtttgtttgtttttggctggagagtggcctatggcttatgggtctgatatagttttcatgcttaattttgtgttgtcttaagccttatctgatcactgcagccagaatttaagagaagtgagatatagatgacgctggggagttacacagcttggtattcagaagaaattgtgtcttcacctgcctgaggttttaaaagttgatctgtgggaaggggctggttgccgtcaagaaaagtccatggacatctgtcaggatccgaggggtactgagtgacagtgatattgctaaccgggctttcctagtaactgcaacattgccaaaagagtcacatgttttcaactgtttttttgggtgtcctgtttatttaaaggcaggactttctgtcagctctgttggtcttcctttttgtccccattacctgtatatgattcctagtctactgtcctgcaagggcaggtggaagcatgtcatcacctgcattcactgttaaagtggcattgtaaaaaccacctcaaacctagctctttcggtttcgcgggtggccgtgcccttgaaaaatagctcaattagtaataagagtagtaaatatgtagaaggtaactttgggcaagaaagttaaaagctctttcctactttcttctccactgcgatctctacgttcactaattttctcccctatagtcgatttttagttgtggtagttatatcccataaaagtctcctggaacactgcatcagcaaacattgaaccattacttctaggagaaatacaaggttagttgcctgtcagactctggtcacaatattttcatccatcgattaatatataaccttgttttatgtgtgtttctgtttaaagacagtttatatatatatatatatatatgtgtgtgtgtatgtgtatatatatgtatatgtatatataaatgtatatgtatatatatagagtattaaccttgaactcatgaccaaccacactatagtttatcagaacaaagcttaactaatgtacatatttttttctgtaaggtacatcccagtattcttgcaactagggacactagaggacacctcagcactatgctgagggaccattttaagtaggggaatcactaataaaaagcacaaaaattaaaaatgtggtattgtctagatcgagaaaaggatacttgtttatagtatgtgagctggaacaaaaagatagtctcatttttgacctcagctgggagaatacaatttaggtgactcacataatttgctgctttgtcaatgtttacaagagatcatgaaaattgattttggagttacaaataaattttagcaagcaagtaaatttgcaaatatggaatctgtaaataactaggactgttatcatagaaaaattactgctaatatgtcaatattcttgcctctaaactgttgacaatatatttttggttttatataattgtaatgacaggctgggtgtagtggctcatgcttgtaatctcagcgctttgggaagccaaggtgggagaaccgcttgaggccttgaatttgagactagcctggtagcatgataagaccctatctctaaaaagtaaccttgtcttggcaaatgcctatctgcaaaaagtttatcttctaacttatcctagaatctctttaatcacaaatgaaagaagtcatataagaaaaatagagtgccaacaaaaaagagagcacccaagagagatgcttaagtccacaaaattagctgtccaagaatgttaggagcagctttattcataagagccccaaactggaaacaacccaaatagccatcaactaaaataaggttactttgatactattttaagatcaaaacttagtattttgaacaattttgacttatttgaaattcaaacctaactaggtatcgtggttcaatctggcaaaatgggttatgtaatacaagtatggtgagtgataaaaaagttcatcaatagaggaatgattaaataaattatagtctatttgtaccatgtaatattatgtagtagccaaaaagaatgaagtggattcctatgtattaatgtggtaagatcttacaggtattgaaatccatgaagggtaccttgagaggccactccctataactagtcacaggcctagataaaaagaatgggaagaaaggctgaaaatttgaagggaaaacagttgagaatgtttcagaatttaacacagggcacacatccttaatcagatattcaatttgattattgagaaggatagttgtaagagtaaatgtatatacatcatggcaagagtttataacattaaggataaagagaaaaatgccaaattaatatcattaaaatggccatactgctcaaagcaatctgtggattcaatactatttctatcaatcaatgctatttttcacagaattagaaaaagctattctaaaatttatatagaaccaaaaaaaaagcccaaatagacaaagcaatccaaagcaaaaaaaaaaaaaaaaaaaaaaaaaaaaaatggcaaacatcacatcatccaacttcaaactatactataaggttacagtaaccaaaacagcatgatactggtacagaaacagaatataggccaatggaacagaagagagaacccagaaatgaagccacacacctacagccatcttatcttcaacaaagtcaacaaaaataagcaatggggaaatgactccctattcaatcagtggatagcatatgtagaagaatgaaactatatccctaccttttaccatatacaaaaattaactcaagatgtattaaagatttaaatgtaagacctcaatctataagaatcctagaagaaaacctagaaaataccgttctgaaaataggccttgggaaagaatttatgactaagtcctcaaaagcaattacaacaaaaccaaaaattgataagtggggcctagttaaactaaagagctcctgcacaacaaaagaaactatcaatgagtaaacagacaacctacagaatggcagaaagtatttacaaactatgtgtccaacaaaggtctaatatccagaatctataaagaacttaacaatcaaaaaccaaataagcccattaaaaaatgggcaaacgacatgaacagacacttctcaacagaaaacatgcaagtggctaacaaacatgaaaaaatgctcatcatcagtaatcctcagataaatggaaatgaaaactacaatgagatataccatgtcacaccaattaggatggtattattaaaaaggcaaaaaataacagatgcttgtgaggctgtggagaaaagggagcatttatgtactgttggtgggaatgtaaattagctcagccattgtggaaagcagtatggtgatttctctaagatcttaaaacagggctaccattcaacccaacaatcccattattgggtatatacctgaaggaaaatacattgtcatacccaaaagtcatgtgcatttataggtttatcacagtgctattcacactagcaaagacatggaatcaacttaggtgcccatctacagtggattggataaagaaaatgttctacatatacaccgtagaatactatgctgccataaaaaagaatgaaatcatgtcctttgcagcaacatggatgcagctggaggtcattatcataagtgaattaacacaggaaaagaaaatcaaatactgcatgttctcacttataagtactcacacatggacataaagatgggaacagacattgaggactactggggtgtggagggagggaaggtggcatggattgaaaaactgcctattggatactatgctcattacctgggtgatgagatctgtatccgaaacctcagcattacacaatatacccaggtaacaaacatgcacatgtaccccttgaatgtaaaataaaagttgaaattatattaaaaaagaaatggtaataagtagagttattaataacaaggaatgacagaaaattatcttagaatttcagagaaaaaacaaatgtcgatacagatttttatgtaatctaataatttaataatgatggaagaacatttaaagacatataaaggatatttatatatcctcatatgttttatatgtataaatgccctgaaatctatgttttgttattaatattataatttagtctttgtttttgttaatattgacatattttcttttaatctctatttttatttatttaatttttggattatcccttttaaattcttttttaaattttttatttttccataagttattggggtacaagtggtatttggctacatgactaagttctttagtggtgatttgtgagatttgggtgcacccatcacccgggcagtataaactgtaccatatttgtagtcttttatccctcacccccccccactcttccccaaaagtccccaaagtccattgtatcattcttatgccttcatgtcctcatagcctaactcctacatatcagtgagaacatatgatgtttggttttccattcctgagttacttcacttcgaataatagtctccagtctcattcaggtcactgcaaatgctgttaattcattcctttttatggctgcataatattccatcatatatatatgatgtgtatatatatatgttgtatatatatatggtgtatatatatcatatatatggtgtatatatatggtatatatatcatatatatggtgtatatatatggtatatatatcatatatatggtgtatatatatggtatatatatcatatatatggtgtatatatatggtatatatatcatatatggtgtatatatatggtatatatatcatatatatggtgtatatatatggtatatatatcatatatatggtgtatatatatggtatatatatcatatatatggtgtatatatatggtatatatatcatatatatggtgtatatacatactacatatatatgatggaatattatgcagccataaaaatggcttttattacattaaggtatgtcccttgtatgccaattttgctgagagtgttaatatatggtgtgtgtgtgtatatatatatatatatatatatggtgtatatatatggtgtatatatggcgtatatatatggttgtatatatatggtatatatatggtgtatatatatggtatatatatggtgtatatatatatggtgtgtacgtgtgtgtgtgtatgtatgtgtgtgtgtgtatatatatatatatatatatatatatatatatatatatatatatatctcacagtttctttatccacttgttgattgatgggcattaggattggttccacaattttgcaattgtgaatggtgctgctataaatgtgtgtgtaggtatttttttcgaataatgacttattttcctctgggtagatacccagtagtgggattgctggatcaaatggtagttctacttttagttctttaaggaatctcaaaatggttttccatagtggctgtattagtttacattcccaccagctgtgtagaagtgttccctgttcaccacatccacaccaacatctactgttttttgattttttgattatggccattcttgcaggagtaaggtggtatcacattgtggttttgatttgcatttccctgatcattagtgatgttgagaattttttcatatatttgttggccatatgtatatcttcttttgagaattgtctattcatgtccttagcccattttttgataggattgtttttttcttacggatttgtttgagttcattgtagattctggatattagccctttgtcagatgtatagattgtgaagattttctcccactctgtgggttgtctgtttactctgctgactgttccttttccatgcaaaagctctttagtttaattaggtctcagttatttatctttgtttttattgggtttgcttttgggttcttggtcatgaaatccttgcctcagccaatgtctagaagggtttttccaatgttatcttctagaatttttatagttttaggtctgaggtttaagtccttaatccatcttgagttgatttttgtataaggtgagagatgaggatccagtttcattctcctacatatggcttaccaattgtcccagcaccatttgttgaaaagggtgtcctttccccactatatgcttttgtttgctttgtcaaagtatttgggtgtggctgtaagtatctgcatttatttctgggttctctattctgttccattggtctatgtgcctatttttataccagtaccatgttgttttggtgactatgccttatagtatagtttgaaatcaggtagtgtgatgcctccagatttgttcttttttgctcagtcttgctttggctatgtgggctcttttttggttccatgtaaattttagaatgctttttctaattctgtgaagaatgatggtggtattctgatggggattgcaatgaatttgtagattgcttttggcagtatggtcattttcacaatattgattctacccatccatgagcatgggatatatttccatttgtttgtatcatctaagatttctttcagcagtgttttgtcattttccttgcagaggtctttcaactcctttgctaggtatattcctaagtattttattttattttttccagctattgtaaaaggggttgagttcttcatgtgattctctgcttggttactgttggtttatagaatggctactgatttgcgtacattaatcttgtatctggaaaccttcttgaattcttttattagttctaggagctttctggaggagtccttagggttttcaagataaataatcatatcgtcagcaaacaatgactgtgtgactttctctttatcaatttggatgccttttatttctttttcttgtctgattgctccatctaggacttccagtattacgttgaagaggagtggtgagagtgggaatccttgtcttattccagttctcagagggaatgctttcaacttttccccattgagtattatgttggctgtgggtttgtcatagatgacttttattacattaaggtgtgtcctttgtacgccgattttgctgagagtgttaatcatagagggatgctggattttgttgtatgcttttttctgcatctattgagatgagcatgtgatttttgtttttaattctgtttatgtggcatatcacatttattgacttgcgtatgttaaaccgtccttgcatccctgatatgaaacccacttgattatggattatctttttgatgtggtgttggattcagttagctagtactttgttaaggattttagcatctatattcatcaaggatattggtctgtagttttgtttgttggttatgtcctttcctggttttggtgtagggtgatgctggcttcatagaatgaattagggagggttccttctttctctatcttgtggaataacgtcaaaaggattggtaccaattcttctttgaatgtctggtagaattctgctgtgaatctgtctggtcctggacttttttttattgataatttttaaactaccatttcaatctggctgcttgttattggttttttcagagtatctaattcttcctgatttaaactaggagggttgtatttttccagtaatttatctgtctcttctaggttttctagtttatgtgtgtaaaggtgtccacaagtagctttgaatgatcttttgtctttcagtggagtcagctgtaatatctcctattttgtttcttaatgaggttatttggattttctctcttttcttggttaatcttgctagtggtgtatcaatttttttttatgttttcaaagaaccaactttttgtttcattcatattttgtatgttttttgtttcaatttcatttagttctgctctgatctttgttattttctttcttctgctgggtttgggtttggtttgttcttgtttctctagttccttgaggtgtgaccttagattttctgtttgtgctctttcagacttttagatgtaggtgtttagggctatgaactttcctcttagaaccacctttgctatatcccagaggttttgataggttttgtcattattgtcattcagttcaaagaatttttaaatttccatcttgattttgcttttgacccaatgctcattcaggagcaggttatttaatttccatgtatttatgtggttttgaaggttccttttggagttgatttccagttttattccactgtggtctgagagagtgcttgatataatttcaattttcttaaatttattgaggctcgttttatgtcctatcatatggtctctcttggagaaaattccatgcactgttgaatagaatgtgtattctgtggttgttggatgaagtgttctgtatatatctgttaagttaattcgttccaaggtatagtttaaatccattgtttctttgttaactttctgtcttaatgacctgtctagtgctggaagtggagtattgacgtccttcactattattgtgttgctgtctatctcatttcttaggtctattagtaattgttttacaaatttgggagctctagtgttatgtgcatgtatgtttaggattgtgatattttcctgttggacaaggccttttgctattatataatgtccctctttgtctctcttaactgctcttgctttaaagtttgttttgtctgatataagaatagctacccctgctcacttttggtgtcatttgcatgaaatgcctttttccacccctttactttaagtttatgtgagtccttatgttttaggtgagtctcctgaaggtagtagatagttggttggtgagctcttatccattctgcgattctgtagcttttaagtggagcatttaggccatttacattcaatgttagtattgaaatgtgaggtaccattgctttcatcatgctctttgttgcttgtgtactttttttgttgtttttgctttttaacttgtatttttgttttataggtcctgtgtgatttatgatttaaagaggtgctgttttgatgtgtttccaggatttgtttcaagatttagagctccttttagtggttcttgtagtggtggcttgataatggtgaattctctcagcatttgtttgtctgaaaactactgtatctttccttcatatatgatgcttagtttcgctggatacaaaattcttggccgataattgttttgtttgaggagggctgaagatatgtccccagtcccttctagcttatagagtttctgctgagaaatctgctgttaatctgataagttttcctttataggttacctggagcttctgtctcacagctcttaagattccttccttccaaatggacttaactggtataaacagaacacttcatccaacaaccacagactacacattctattcaacagtgcctggaactttctccaagatagaccatacaataggccataaaacaaaccttaataaatttaaggaagtaatgctcttaactttggataacctgatgacagtgtgcctaggtgaagatcttttttgcgatgaatttctgaggtagtctttgtgcttcttgtatgttggtgtctaggtctctcacaaggctggggaagttttccttgattattcccccaaatatgttttccaggcttttagaatccttttcttcctcaggaacaccgattattcttaggtttagtcatttaacatagtcccagagttcttggaggctttgttcatattttcttattctttttgtcttggttggattgggttaatttaaagaccttgtcttcaagctctgaatttctttcttctacttgttcaattctattgctgagactttccagagcattttgcatttctaaaagtgcgtccaaattttcctgaatttttaattgttttttttttctttatgctatctatttccttgaatatttctcccttcacttcttgtatcattttttggatttccttgcattgggcttcacccttctctgatccctccctgataagctcaataactaacctcctgaattctttttgaggcaaatcagagatttcttcttggtttggatccattgctggtgacctagagtgatttttttggggggtgttgaagaaccctgttttgtcatattaccagagttggttttctggttccttctcatttgggtaggctctgtcctagggaagttctagggctgaaggctgttgttcagattcttttgtcccaaggggtgttcccttgatatagtactctcctccttttcctatggatgtggcttcctgtgagctgaactgcagtgattgttgtctctcttctggttgtagccacccaggaagtctactcagctctggactggtaccaggggctgtctgcacagtgtcctgtgatgtgaaccatctatgagtctctcagccatggataccagcactttttctggtggaagtggtggagggtgcaatggactccatgagggtccttagctttggtggtttaatgctgtatttttatgctggttggccccctgccaggaggttgtgctttccagaaagcatcagctataatagtagtatggagaggaaccagcggtgggtggggtcctagaactcccaagattatgtgccctttctcttccactaccaggatggatagggaaggaccctcaggtgggggtggggctaggcatatctgagctcagactctccttgggcgagtcttgctgtggctgctgtgggggatgggggtgagtttccctggccactggaattgtgtacctaggaggattatggctgcctctgctgagtcatgcaggttgtcagggaactgggggaaagtgggcagtcacatgcctcacccagctcccatgcaaaccgaagggccagtctcactcccaccgtgcccccaccccccacagcaaacagccccgagtctgtttctaggcggagggcaagatgggcttaaaaactttcctgagaatatctgcctcctagctgtgaaagaaaaaggctttagttcttccccaacctgtgaagtctccacaccagattaatgctcttccccaagttctagccaggaggcttcttgccctgttcaaattgtttcaaagttcagctagggaattccttctccctgtggagttttaccccctgttcctctagccaccctcccaatggatccctgttgtgccaggcaggaatgggctgcttggggacccagtgagctcccagggcctttctgctgcttcctctacccctgtcttttgctcggctctctaacttgactcagctccaggtaaagtcggaaatttctcccgcaaacagaccttcagcttttccagtgggggtgtctgtttgtgagaggagggcctccgtttcccacttgcacagttggggcactcacagtatttggggtgtctacccggtcctgcaggagcagtctgcttccttcagagggtctgtgggtcctctcaggatttctggtttgttcttgcagtcaatctggagctaaaatttacaatataagcctccgtatgctgctctgtcccggctgcaaatctagtcctccctcccatccgccatgattcccatacctaatctctatttttaatctttgttattcatagaaatgtctcttaatcaatatgtagctacattttaagaattaagctgaaagtctatgttttgtaataggatatagcaaacccattacattcacaaaatatttagattcatttatgttacttattttttgttttatgttttcatttgtgttcttttcttttattttcaggcagttttagactgaccaaagtctctttgatctatttttcttcttcagtggtttggaagttaaatatcctatttttattctttgaatggttgctcttacacttttaatgaacatctttaaactttgatttgcgttttcatcagtgaatcagtctgtatttatattctcccacaaacaacactagaatattcacttttactcctcttcagtttctcctctccctaccacgtgatcttccagagatgtcatcaaaaatttagttctttttactattttttttcaactttttttcttccatcatcctacctcatgtttctcagagatatcatctaaaaggttagattcttgttaaatgttttttgtaatcatcacttaaattattgattattataactgattccttatgtttggattaaattttcttcttgctagagcacatccttttgtaattcattcagaattacattttctgagtctgaaaatgctcttttttcattcttatacttggataatttagttttagtattttaagctcaaaattattttccctcagatcttgggaaacattgttctattgtcttttttcatctgatattactagaaaacaagtccagcataaggctcattcttttatcaaagtgcattatctatttcacaccttcttcttaccagtcttctggtaagacttttctctttattctcagctttctgaattttgccatgttgggcttagttgtagtctatcttattcatcttgcgtaggactcaaaggcttcttttaagctgaagtgtaatgattcctttttcctctctttttggaactgtagtagacattcattggtaaactggaagatatcttttatgtctctttaacttatctttcataagtttttaatttttttccttttatacatacttttggagaatttttaactgctttttctgtttttaaagttactttcgactgtatccccatacagtaatccatagtgatagaaatcagagtagtggtttcccggttttgcagggagagagcagggcagacattaccttggaaggagcaccagggaactttctagtgtgtgcattgtaataatgttaaaataacactattgttacataattaaaacaactgtatccattcagccattttctccatctatggatctttttaaactctaggattaaaattttaatttcccccgtggtttctatattctcacatcttataaggacattggttacatatattctataggcttatttgtttgctttctcgatttgtccagctttggcagatggaagttattctttggtttagtttgatgcctctttttatgtcagcattcttcacatgtttggtaaacattttctgtatttgtctatgttatctgagagccaagtttatgaaagtctgatcagttcccttcagcctgtcttcagaaattgcaggaggctggtagaagaaggcaattgtgctatgaaatgaaccagtgactagtttgtttctcctaagtggtgtttgcctcctgagatccttctttaaccctagtctagaagctctaatgttccctgctcccgactggcattgtatacttttcttgcactctgcttggtttagcgagaataaagaagagagtgtgcataagtcaatgagtctggcggtttctacttaggtccccccaacctgcagattttgacttggagtaccctggatcctctttcactctttatagtagatatcccacacacacatttttgcattttaataatacaatctcatctattttcatcttttttataattcttcatagacttaggtacttcttcattgttactcaaaaacagctaagattttttttctctttttttttgagacggaattttgctcttgttgcccaggctggagtgcaatggcaccatcttggctcaccacaacctctgcctcatgggttcaagtgattcttctgcctcagcctcccaagtagctgagattacaggcatgtgccaccacacctggctaattgtgtatttttagtagagatggggtttctccatgttggtcaggctggtctcgaactcccgaccttaggtgatctgcctgccttggccacccaaagtgcgggattacaggcatgagccactgctcctggccatttttttttttcatatgtttttggacatctaggactttggaataagacaggaagtagggcaggctacataatttgcagaatctagtgcaaagttaaaaagcgggacatcttgtccaaaaagtaggaaaagaagtgtcgttaaacgtgctgtaatataaagtttttctttataatattttactaacaaaaatcactagcgttttcctaagtcactaaattttcccgtataacatcattcttcccctcaactggaaacttaaaaaaaaattttacattgccctcagaggcaaaaatagctaacactttttaatctgtgttgaaaacattatttcttctcctctttttgaaatttttaattttttaatcttttaaattacggtgaagtacgtatagtataaaatttaccatcttaaccattttaaagtgttcagctccatggcgtaaattacacttacattgttgtacaaccattgccactgtccagctccagaactcttttcgtcttgcaaaactgaaaaataataaagcttttttctttaaaaatgtttatcacttataaaacataataggagtaatagtgatggatgaggagcaacgtaaactgaacaattgcaaaaaataacatttttggtgttgtagtgagttgactactgtctgccaaaattcatatccactcaaaacctcagaatacaaacttatttagatacagggtcttttttgtttgtttgtttgttttaattttattattattatactttaagttttagggtacatgtgcacaacgtgcaggtttgttacatatgtatacaggtgccatgttggtctgctgcatccattaactcgtcatttagcattaggtatgtctcctaatgctatccctcccccctccccccaccccacaacagtccccagagtgtgatgttccccttcctgtgtccatgtgttctcattgttcaattcccacctatgagtgagaacatgcggtgtttggttttttgtccttgtgatagtttgctgagaatgatggtttccagtttcatccatgtccctacaaaggacatgagctcatcattttttatggcagcatagcattgatacagggtctttgttgatgtaactggattaatgtgaagtcactctggattaaagtaggtactaaatccaatagctagtgtcccgagaagcagaggagaggacacagagacatccagaggagaaggccatgtgaagacagaggcagagattgcagttatgctgtcactagccagggaacacctgaagccacctgaagctggaagaggcaaggaagggtggaacctgtagagagagcaccaccctattgacaccttgattttggacttctggcctccagaactgtgacagaatgaatttatgttgttttagtttgcccagtttgtggtaatttgttgcagcagccctatgaaactaatacaggtatcacacttctatgtagcaaataaatagtaattctttaagaagacatcttcattgaacgtaagacttttacttttctgcaaattcatttattaagtcatcaaaatttatacttctagaaattttgttttcaattgatataattaaaaaataacacgagttggtcctgacaaatgcaagatcacaaataattttagataattttttattctgaggaggagattttttagatacaactgtcattggacctgttaaaagtattttagtgctatgcaacatcgggattaacttctgatgaattattttgaaatacaaattttaatgtatctatagctgatgacttttaagaaatagtttttctaaatagatttaactcttcatacaaatcacttttgtgtaactccaaatttaattttgttaatttacacaatgatagtttgacatttcctctgctatttttggaattggtggaggtctgtacaaggaattaaaagtggtgtaatgattgtatataattcacaatgccattttgtgcactctatcattacatcttcaattttaatgaaaaattaatgagataattgtcttctttgttaaaaatttatctaaagcttcatataaaaatagtgttattttccattgaatgtgacaatctttacatttaatttctgtttctaagcctgtggatatttgttttgcaacattgccgcaattttcaaaattagtaatacctctttgaacatataataactccctgaaatgttttattgtgtaatgtccatgtgtactttttcttggcaattgtttactaacagggtttactgtctgataagtggcagttcccacccggaccctcaggctggagggttagtatttgtgctgaggcacagggttgggctccaaggatggaatggcaagctggcatcccaccgatggtcccaacactggaacatagagtctcacctgtcttgggacagggacactaatggggctgcttctgctgcacctgccaccatcaccaccatgccaccaccaatctgggcccaggtctgagtatggctgccccctcaggctctgcatcacaccagcctgcccccaggatgctagtgagtcccatgaggctaggccagctgttccagttgctactgactgttgtatctctgggtgtgagtctatgtggtgtgtgtgtatgtgtgtgtgtgtgcactgctgcctggagtgtgtgtgcttcctctgttcacatgggtgctccatggtcctatcagtcttcatttgcaaaacacaggttcaaagaaaaaattattatgaatatcatgacagtgatagtgaaacattaaagcaattgtgaggttcttcctgcgtgtgtgtcccagtggggctacacatgccacatgtccacagagccagccctgatagggaggcagcaggaatactgcatttaccatcttgatctgatctcttgatgaaagccaatattgctttactaaaccacttttatgtggaatgtggtgcatttgcatctgagttggttatcctagtttgcattttccagctggacaaaggccagtttcaatggctttagagagagggaataatctagacttgttcctatggctagggaccaaacaggtttttttaatttttaaagttattttaaaatttaatttgattttttttagagtttcactctgttgcccaggctggagtgtagtggcgtgatcatggctcactgcagccttgaattcctggacttagtgatcctcctgcttcagcctcccaagtagctatgactacagatgtacattgccatgcctggctaatttctaaaagttttttatagagttggggtcttgctatgttgcccaactagtcttgaactactggcctcaagctatcctcctgccttggcttcccaaagtgctgggattacaggcatgagccatcatgcttggccccaaacagatttttaaatctcttcttgagaatcaagagtcacctttgtaatgtggaaggttatgtttatattattcagaaaacgctaatgactgtgcataaataaagcttatcctctatttttaatcatctggtccttaaacatgtaaatcatcttcagcttcccagttatagctcatggatcagtttctggtataatctatatcattccttggtgacctttctcccctcattttctgcatgtatatatcttgtggttaggcatcagaaggctgtatcttatttaagtatctgaatgtatcatcaggcttataaaaatggttgatattgtagagttcagagattcagagctagatgcttatctgaaagcatttccaaacctatctggtactggcctgaaccagattctgttctgtttggaatagaaattttacagtatttcatttttttccagataggaaacaataatgagtgtagcttattgaagtattttcttaacattatagcttttttactgatgaaagaatatgagattatataatctttgttatttatcttcaaaactcttgatattacatgccatagtatactacagcatggactatttttataatatgtactagttataaaatgtataccacaaaaatctatattatactagttataaaatgaataccacatgcatacttgtgctagttataaaatatataccatatgtacttgttataaatgtatatcacataaaacctatattatactagttctaaaatgtatgttacataaagcctgtattataactggaggactaaatatcagctagttaacaaattacccagatgttctttatgtagtcttatagatctttatttgattgtctaattatgccttttatgtgactggagatggttctacataaaaatatttgggaagcttgactttctgccagaccaaagagattcaaacttacttgagaaatataagccactttcatttactaagtgtctgtgattaaggcagaatcccctgcttaaaatcatagctttgggaagggaatataaacagaaacatagctcatgcccatgcccactgtttctcgctgccctggacttttgccaagcttcagtttggcattatcaaaaatacagagcatattgttattattagaatatgaattcacaactgggtttatattgagtaaagatttgttatatttttttaaatttctgagttatttcttattggtgagtgcttggaaaaatggagtcagagcttggtatgaggggaggaaggaggcaaaacctattttgttgaaaaccctaatggggaagattcacttttctactggattcatatttttgtacttctccttgtcgaaatgattgttttggacaaaaaagccaccttctttatgtatatttactcatgttgctaacaattaaaaattgttttcttttacacgttgcttttacattaaaaatgattaaacatatattggtctttgaggcattagcctttcatcttggggtacctaatttaaaacctggtccagtttaagcagaaacaagttggatcttgtcaccttcactcatccaagctttcagaatgaacaataattacagtaaactcaaatcattccaaaatgttttctcattatattctaacacatgaagaatagtaacaaaatactttattgtgtaactaagaaggattagtattttttcttgaaaatcattacattgtagccttcatcagaagaaaaataatgaactgttacagtttctgttataagctatattggaaaatgaaatcagagtgtcaagtatgatttcacaacattgtgaatgagagaccatgggtctggtgatgtaagaggccactttctactccttgggagaacagtttatacccctgtggtcctcaatccacaggaagtcttttctttattgcttaactccactctagtaagtcactgacctccatgtccccttgagttccatattgaatacaccaggttaagttcaaatccaatcggaacatttacattttaataggattgatagacttaaactgaagaataaaacttgagtgtgggaagttttgatagacagaaggagcaagatcccctgtcattgggagagcctttgaatcttactggattcccactggagcttcatattttttgggtgtggacaagagggtcctgaggatagcaaagtgtccttctcccattctatctttttcttcaaagggcacatggcattctgggtggcctgagacaactttgtcacttcttggctgtagtaacttggagaataattgctatctttgtcttatgctcaggtctctgtacactcctgcagtatccttgactcactcctaacaaggtccccagcattgtctcaatatgtacagtggtccagtttgctgtaccctcccattgctttcataaaacaattgcaactctccttcagggtctctgtagccaacaggcatcaaacttcttggaaaaacttcttggcttcttggatgaagccctgaatagctttgttgtatgagtcaggtacacactttatttgagagtgtgggagaactagctaatactttcactactactatgtattggtagtttaaacaattcaaagtataaaatttatccatgaacttggttttattcttctgccatgtaactaggagtgagaatacttcatgtagtaaaatgctgcaattttaatgttggaggttcttaaaatgctctaattcaggtcttgcttatgttgtctcaaatacaagctcacccctgcactgccagatggtctctatgtgcatttatgtgtgtagacataggcctacttctaagatattgtaggtttggttgcagaccactgcagtaaaataagtatagcaataaaatgagtcacacaattttttttggtttcccagtgcatataaaagttatgtttatattattctgtagtctattaagtgtacaataacattatgtctaaaacaaacaatgtacataccttaaataaaaaatactttgttaagaaatggtaatgatcatctgatccttcagcagagtcatgatctttttgctgggggaaggtcttgccttcatgttgatggctgctgattgatcagggtgatggttgatgaaggttagggtggctggggaaatttaaaaatataagacggtaatgaagtttggctcatccactgactcttcctttcatgtaagatttctctgtagcatgtgatgctgtttgaaagcattttactcacagtagaactttcaaaattaaagtctaccctctcaaaccttgccactgctttatcaaccaagtttatataacgttccaaatcctttgttgtcatttccacaacgttcagtgtcttttctgggagtagagtctatctcaagaaaccactttctttgctcatccataagaagcaagtcctcaaccatttacattttattttgagattacagcaattgagtcccatcttcaggcttcacatctaattcgagttctctttctttttctaccatatctgcagtgacttcctccactgaaattttgaacccctcaaagtcattcatgagtgttggaaaaaacttctaaagtctgttaatgttggtattttgacctcttttcatgaatcattaatattcttaatggatctagaatagtgtgtaccttccagaagttttcatttacttttcccagatccatcagaagaatccctacctgtgatacctatagccttatgaaatatatttcacaaacagtaagacttaaaagacaaaattacttcttgatccatggactacagaatggatgttgtgttagcaggtgtaaaaacaatattaatcttctgtacatcttttattagagctcttgggtgaccaggtgcattgtcaatgagtagtactatcctgaaaggaagctttttttcctgtgccgtaagtctcaacagtgggcttaaaatatttagtaattcatgctgcaaacagatgtgctgtcatccaggcttcgttgctccatttctggagcacagacagaataggtttagcttaattcttcagggccctagaattgtcagaatggtaaataagcatttacttcaacttaaagtcaccagctgcattaacccccaagaagacagtcagcctgtcctttgaacctttgaagctaggcattgacttctctctagctctgaagtcctagatggcatcttctccagtagaaggctgttttgtctacactgaaaatttcttgtttagtgtagccaccttcatcaaggatcttagctagatcttctggataatttgctgcagcttctatatcagcacttgctgctttcttctgtacttttatgttatggagatagcttttttccctaaacctcatgaaccaatctctgcttgcttcaaacttttcttctgaagcttcctcacctccctcacccttcacagagttgaagagagttagtccttgctctggattaggttttcgcttaagggaattttgtggctggtttgatctatctagaccactcaaactttctccatatcagcaatgaggctgttttgcttttttaccattcatggattcactggagtagcacttttcatttccttcatgaacttttcctttgcattcacaacttggctgtttggcacaaaaagcctagcttttggcctatgttggtttttgatatgccgtgctcactaagcgtagtcatttatagtttttgatttcaagtaagagacatgagactcttcctttcacttgaacacttcgaggtcattatggggttattaattggcctaacttcgatatgatcctctcagtgggtagagagagctgaggagagggagagaaatgagggaatggccagtggagcagtcagaacacatacaacatttatgaattatgttgggcatcttatttgggtacaatttgttgaccctaaaacaattacagtggtaacatcaaagatcacttatcacagattgctctagcagatatgcttcttcagtaatgaaaaagattgaatattgtgagaattaccaaaatgtggcacaaagacaaaaagcgagctcacgaaaagtgagcatgtactgttagaaaaatggtgcccatatacttgctcaattcaatgcagggtgccacaagcctttaatttattaaaaatgcaatatctgctacaagcaatctagaaagtacaaaaatgtgaggtatgtctgtattagatgagagaaactaaagcaaagtcagaggtctctaaggggagattggccaggcctttgacctgcttcctatccattcaaagatcatcaggcctcaatatattgacttctcattgctaagaatacatgaggctaagaataataatttattaatccacagtgagaaatggagccatcacattatattagtccattcttgcatttctataaagaaatacctgaggctgggtaatttatagagaaaagaggtttcattggctcacggttttgcaggctgtacagacagcatgatggcatctgctcagcttctgggaggccccaggaaacttaccatgatggcggaaggcaaaggggaagctggcatttcacatggctggagcaggaggaagagagggggaggtaccacacacttttaaccaaccagctcttggcagaactcactttcatgagaacagcactaagggatggtgttaaaccatcatgagaaatccacccccataatccaaccacctcccaccaggtcccacctccaactttggggactgcaatttgacataagatttggtggtgacacagatcaaaaccatatcacgtatggaagaggataatggagatttatgatgagtttattttttccctatcatcaaactacatggtttctcactgtgttcatttacgacatgaaaccactgctgtaaagaccagaaatgttcacattaagaaggtcaatttcctttctttctctgtagccaactgatttgagaatttgaaggtcatttggggagtacaacattggaacaaagagagttagataaaaaaatcctaaacaacagtggaccaaggtagtcagacacctctagtaaacaagttagccttgccagtggggcaagatagaatgatgtctgttggtttcatcctgcatcccattatactttaggagtgcccttacattggaattggaagaaacacaccaactccaatggttagaccttcctttctcttggattatgctttgctgggcactggtaataaactgtcttgtccaatccatccttattttgattgacagattgatttttagaatatattactgtaatgtgttccatctggttatagtcaagcctgttagcctgtgagccaatcaggtgacttgatctctatatgcactgtctcatgttaggctgctcttatatttatctctgaagataatctgttatttctaaattcttgaggacaccttactttagcccccaaatattaacacaaaatacttggtacaaaaataaggcagatttttaatgatcagcgtacattcttaaatgacctacaatgtttggtgcagtatatcaggcatgatgttttaccctttattttatactgaggactctgaactatgagtcttctaaacagaacatctatatattaattcctttgataaattaaactaaaatattttctggtaggtttctcaagatttgatttcttggtcaccagaggatatgttttcaagcatcatcttaaatagaaaaatacatgtaaagtctaaaatagcttggtcacatgacttggcgaagtcatttgaatgaagttacttatgagccatttcttggtgtgcaatcctattaaatttatgatggtcaattatgattatgaaaacatgccaaaaggctcttccaggtgtatttttacagcattttcattttgttctttagcttttttggttgctaatcaaattgtgctcatcagagaatgatcaaaggatatttaagacaagattttggttttcatatactatttaatataaaactattggcttcattttttatactcttttaaatatattaaaatgttcataaggtatgtgaaaaaaaggaaaaagcagctttcaaaaacagtgtgtaataatgattttaattttgtatagatctctgtatatatgtatatatatctagttaagaaaaggcagaaaggcattaaacacagtatgaatcagtaattttatttatttcagggtggtaggaaatttaagtgaataatttagatttttcctccctgatttttgtattaaaaaatataactaggccgggaacagtggctcacgcctgtaatcccagcactttgggaggctgaggtgggtggatcacgaggtcaggagatcgagaccatcctggccaacatggtaaaccccatctctactaaaatataaaaaattcgccgggtgtggtggtgcctccctgtagtcccagatacttgggaggctgaggcaagggaatcgcttgaacctgggaggtggagattgcagtgagctgagatcacaccactgcactccagcctggtgacagagcaagactccgtctcaaaaaaaaaaaaaaaaaaaaaaatctgtatctctatctatatctctatctctatctatatatgtatataaaactagtgtgctctgtttactctagaatagcaataagttaaaaaatactctgagagatttgttcttcattctaaaatagcagtgtcttcagcaattactttaccataaagctggtctcattattttccttaaaaaatttagggcacttgagtttttttcccagtcacctttcatcattgtgactgattaattgaaaatcatcgagtcagaagccacttttctactccaagctttgagctagtcagcgagaaactatttttgttaatacaaaaaataaataaaggatatttctgtgttttctcccatttcacttatccagtgacatcattgattaaaatccccatcctttgaaggaaaaattttgagctactactaactggaacagttcatctgctggagaaattgttgtggggacaacctgctttttagatgatagcttgctagataaagttgtcattacatttagcttggtctttaattataagcagatggatgaattattttaactgctgctatatatcttaacagtagttcatacattgacacaaagtgaagaacatcaaacagaaattaaatactaggtcaggaaaacagccagccttcaagggaagcaattgatcacaaactgtcatgtttaaaggccagaagaatgcaaaataaacacttgggattagtgtactaaatatagttcatctgtcttcagctctcccctctgataattcatctatttcacttattttaatgctttatcatgtatctctccagctctgtaattagtctttcaggtattctccttttcttcctgcctttgaaattttgtgtggtgagattctgcaaggagaagatattattaccatccagtacaaaagaagcaaccttgaaatggttatattttatagctcatatgctagaattcttgctaaaacttagagggtatattagaattggtttaaagataaggttttagtcaatttaccatattcctttaaatagagagtttagtttggcttaaactgattttacaagagaaatctggatttaggttcattgaactcaaaatacttgcctgcttttttaaaaataaaaagtgcataaattaacttctgaattaacaccaaaatgctaatactagcattttatggctcagtagagaaagtcatttttccttgactaaaaagaatataattaacacattttttccatagcaataaatatacttatggttatatagtcaattctgtttgggatttataatctgccatacattttgctctagaagaagagtgtttccaagacatagatttattaatttattaatcagtctcagaatatcaacaatagtaaataattttcatctattattaaacattgaaaacctgaaacaatgcatgcaaccccaatagataaactgtttccaccttaatgtaaacatgtgatggcttctagtacttcaagtgtagatataatgtcaagatattaacttatcatatgttcctttacagactcaagagagtgggattttctatttttagcttcactttaaactgcatgttgtcattcactttgtagattatctgtgggaaagtttaatcctatctgacttcctgtcataatgtccctgtgctgggtgtgggagcattctcagggactcagtctttccttggaattaactgaaaaccagtatcaactggaatttccagtctgtggcaaattcatcttctcaaattagaatagatttttgttttaaagattctcctatgtttttgtttatgcaattgctcacttttactgttgaggattgactattttgggagaagatattccaaatatgatgctatcaacaatggtatgtgggtttcagaccaacagattggagggttttgtacataaatgctgagaaatacttgtcagcagagaggcaggtaagacaatgtagaatttgtgtattattctaaagcaacacatttcaaattcagaagcttatgtgacttgtctatgagtctatgactcatttctctgatttgtatagaaatgaaacagtgggaaattcggttttattactagcttctgtgtgatcctcagaaaatctgttaagctcttgaaacatacatttcctcagttatagaatgaaaatgaaataagataaagtgtctgggacatagttagactcaactaactcccctcccttcttcctttcctttcttctttcctttggtccttttcaatgtatattgagaaagagaaaaccagtcccaggagccgccctggcgctcataactgagctttggtgtttctttattgaatataaataattttacacaagactgacatcagagaaggccattctgtgaacctgatggagcaagctgaatcaagaccacttcataatcatgccagagcatggacaaaagcaacatcattccaactgcaaaaaagaccaaacatctcccttttctggctaatgcaagtaactgctttgtcactcatagatctttcctcacttcattcctctttccttctacatacaatttattttcttaccccaatttttttcttttctttttttttgagacggagtctcactctgtcgcccaggctggagtgcagtggcacgatctgggctcactgcaagctccgcctcccgggttcacgccattctcctgcctcagcctcccgagtagctgggactacaggcgcccaccactacgcccggctaattttttgtatttttagtggagatggggtttcagcgtgttagccaggatggtctcgatcttctgacctcgtgatccaccagcctcggcctcccaaagtgctgggattacaggcgtgagccaccgcacccggcccttaccccactttttgacggcactcaacctacagtgaagtcccacttccttgaaccctctctaaaataacctttcagaagcccaaattctgtaagtccttttgaacatcctgtctgagatggtcgatggttcactgtggtgtggttcctggtagtctttggctataggacattgacagtgcttagaaatcaccatatgtcttcattgattatgaagaggtcataaaagcagttatttaaactccttaataagaaaaaattgagatctagcaagctattttagttctaaatttgatgctatcattttctagcattgcttgattggtcaaaatcacttacctgtcttgggcatatttttctaatgataagactgggctggaaagctctgcaatttttgtagctctaacattctagggatgattttgtagaaattgtgagtagcattcctggcattagccatggtgaaaaatactcctgtgtaactttggatcctcattgctttagaactcctagccatagaatgaaggttaggggaataggtaatatttgttcagataagaaataggaggttgacccccaaatgcaacagttgctgaacataagcctttatcgttacagcccgatgttatcctggagtagggggcataattttcctgccttgccatcccacctagatgtttgttttctagacagttggaataattaatcaatgtttagtacagtgccatacatatagttgttactaaatagatattgcagatggattattttattatatttatcatatattctctggatgttttctgcctgtcatcagctgaatatgcaaagcagtgagttaaggaatctaggggtatctgaaccacaggtccagtgggaacctgtatgacccggtaggtgggtagtacaacctcacattctgtgctaatccatttcgttttcctattcagagtcttatttctgtttaattgtgaaataaatggcagcaattattaagtattgagagcttggaaatgtgccgggcaccctatcaagccttatcttatttaggtctcacaaggcttgtgtgaaacaggcattattattcccatcttacagatatggaggcatgagtttagtgaggataattaatgggtcttaagtcattaaactacagagtgatgagtttgtatgtttgttctccaaatctggccctttgttcattccattatttctgttttttttttttttctttttttcttttttttgagatggagtctcactctctcccccaggctggagtgcagtggtgtgatctcggctcactgcaagctccacatcccggttcatgccattctcctgcctcagcctcccgagtagctgggactacaggcgcccaccaccacgcccggctaattttttgtatttttagtagagatggggtttcaccgtgttagccaggatggtcttcacctcctgacctcgtgatccacccacctcggcctcccaaagtgctgggattacaggcatgagccaccgcgccaggcctatttctgtggtctttattgttgtataatgtttgttcatatcaccactatgggggtgagaaatgggcaattgtgccaaatgtgcaatgtgtgaaagcatggatattcattatttaaaaaacattttaaggttagaatgaatcaccagcccttatttttagtaaaggcctactgcttatgggacatcaagtctcctgaagccttggtttttctcatttgtaaaatgagtctttgttagagtaatgtctgctatggactgaatgtttggctgcatttggacatggggcctctaagaaagtatttaaggttaagtgaggtcccaaagtagggccttgatcttacagaattcgtgtcctcataagaagagacaccagcaagctctctctctccatcacgtgagtacaaagcaaaaagcaagccagggagggagtcctcaccagcacccgaccatattggcaccgtgatcccagactttcaacctccagaactgtgagaaaataaatttctgttatataaatcacctagttagaggagtgatttcattgtccttcctgctgaataacctcatgtggtcatcagcctccaaagttcctctcctcctggcatttatgtccttgtgtagtcactttctatatcatgtcagagctgctgtgtttggctaataccatatagcagagatgatggtgtgtgattttcaaggctagatcacacacaaaaaaattggagtttctgtcttgggctcttagattgtatgctctgaggtaaacaggtcaccatgctgtcaggaaactcaagcagccctgtgaagagacccacgtaggaaagaattgagacctcctactaatactggcaccaacttgccagccatgtgagccatcttgagtacagatcctgcagtcccagagaagacttcagatgactacagccccagcagataccttgattataacctcattagagactccaaaccagaaccatgcagctatgctgcctctaaattcctgacacataaaagctgtgagagctgataaatgtgtattgttttaagccactaacttttggggttatttgttataaagcaatagaaaagtatcatagtactgctcaccagcaatttatgccttcctggagatgcagagcagtctgacggggcttttcctagctcagcagtattccccatgggaacaggcagtggtgtgctgctagatgtttaacaactggcttcccagcaagcaagaaaacaaagatcctgatttgtagtatttgacaatttccatggtgtaaatacccccaccatggtcagctttaagctaccaatgtgatatcattgaagatggcactggggagggatgcatagtagcaaactgtcacatcgcatttccactatacagatataattgttggaaataggataggtgtggtggctcatgctcgtaatctcaacactggatggccgtggtaggaggatgactttaggccaggagagttcaagactagcctgggcaacatggcaagatctcatctctacaaaaaattaaaaagttagctgggcatggtggccatgtgcctgtagttccaggtactcaggaggttgaggtggaaggattgcttgagcccagaaggttgaggctacagtaagtcttcatcatgccactacactccagcttgggtgacagagtgagaccttattgtaaagaaaaaaaaaatagttggatttagcctcaaaagcatagataatagtaaaatgtagtaaaatcattagggaataaggaggtttgagtgtttattacttttgtttttaatataatttatttaattgtaagcgcctataatttaacttttaactgtggttatattttataatcagctcacaaaattcctaaaaatttaacaattggctcttgtgtgctagcaggacctggctttagtacatcataccaaagtgatttttttcagtgacattgtttatttggattgttgtctaattacatcaccatttgggtagtgataaacttcacatctataataaattgttttcacatctctaacagatagtgactggagacacttaaatggaataattttaggagtttatgatatttggtttgttcaaagtcaccatcctggaaagtgctcgaccaggtgactgttgtttgcctctaattcgggttctaaatggaagaaatactaagaattggataatgtgacatacaattgtatgaaaaacaaacaaacaaactgacttccacattttagaaacacactggttctttactatgtgggtcagggtatcacttttactgccatgtcctgctttctggggtctttatagccttctacttttcctgctgctgggtcttctctaagcttctaagagaccgtacaatttgctgattacaaatgtaaacttcagaattacaatggattcctggctccttaatagctatgtgaccttgggcatgttacttatcctctccaaaattcaaattctttatttataaatagggttgttatagggaggcaataaaatcatgtttgtaatatgcttagcagaacacctgatacataaaactatacactattattagctattatttattcaaaataattgggtgattcactgagaccatccctggtttacacaaactgtgttgttcaaaagttcctttggatctctttgcggtataaattacctccaacagttctcattcactctaaaaatatctttcctaaatgttcagtctgagagcagctgaagaaaggagggtcctggcagacagtgttttaagcacagtaaccccaccatggcccaagaaactttctgtctgagtgtacactgggaagggaagctcctcctctgcagagattggagctgtttctgaagaggaaaaggggcagagtcctcttttccatggaacatgaggatggcgactcagtttctcctcacactgagtgtgcagtgattactttccatgaatcctcctctctgggtttctctcaaataccattaataccaagacccatcaagctcaagactataggattttttgtctcttatagagcttccacctaaccttattggggtgggagaggagatatttattatagactaaggtagtctccttggtttaggtgatgtacccttcacccaagcccccactagtcttccagtgctattcagtgaaaggtggcatcatttttttcctccaaggcgccaagtgtcagaagttatctcaattgtcctcccattaattcttctgagtgactctgagttgggatcaaacacagatttagacaaatcacttagcttctcaaagcttcagtttaaaaaaagctataaaatagtgatgagaatgggtttattatatgcttcctagagttatcgtgaagattaaacaccatgtaagggtgttacatgtgaagtacttaacaacctagcaagacctgatgttttcacagatcagttacacgccccatcgacatggatttttctatttcgaaaatataaacattactctttcttcatttgaccaatcaattcgagttttaaatttcttcctctacttagtacctttttttttccttgcaaatataggtttcaggaaactcagtagattccactcttgcctgggatacttagattaaccccctacagcctctggcaggaacaaaggcatggatgaaagagagaggagcgtggtgatacaaagctgactgcagagacacatggcttctgccaatgccagaggaacaggtgagccggctggacaagacggacactcagatgtcttgcttctcaaatgtcttgcttctcacctacctctggaggaaaactcagaggatgcctaggctcaaaccaatctttattatactggtgccacaacacagcattgcacctctttgatgccctacccccattccatttcatcttaaaaaaatacaattctttgcattgaatttattcccctcctcctcccacatatgttgatgaaaatcggttgatggtgatagatacaaattagccttgctaactaactggaaatcttccagggacatatcagcaatgacgatttggaaagcagtatgctgtggagtcttgtcataaggataatgatttttttttcttgtagcagcttggtttctccttctctgggtaaatttttattttttcatctaagacaccttcgtgattatgagggatggatctcttaagctttgttaatggctaggccagaattggaacaaggatggagaaggtacaagtcctgtggtcacagagctcacagggggacagattagtcaacagacttgtctaatactgtctgttgagaacaaggatgaaggtttgcatacggattatgacagtacatgagcaggagcgtcacacattgcttctgcaagaggctgactcacaagttgagctttgcagcgtgatgtgtgatcattccccattcttctctctaccacttccagatccattctttttttggcccaaattggcatcctaggatcctgactcccgcctagtgtgtattgtgattccccacccagtccctcatctagaaatgcaggacttagtcccctaaatgctggaagaccaacctcacatgtcaacccttttttgggattttgtctcctgaagaacatgtctcgtctaaggtcgtgcctcctctcaggggcagctgtgtccagtgactgattattgaggggctataaaggccacccctcctcccgccaccatttgctccaacttgaaagaaatctgaaggatcattcaagcttcagagcttgcatggactcatctgaggccttagctgggtatgcaccatgtgccacctcctcctctgcccaatcctgtttccttcctctcccttccagggttggtcatcccaagagcactctctgttaagtgtcctgcacactaacccccatctctagtgaacccaacctacaacatctgtggactgcagggcccaggctaactggctggctggattcctgatgggttcagccagtagcctgtgatcagaggtggggaagacagagaagcatttactctgtgtgccatgtaccctcccttcttccacactgttctctggcagaagctgttctctctgggactatggtcctatccaggcaggtgcttctctctggtgcctgctctcactcactcagctctgagagtagtaatcttctctctgttgctagtctctgggagacaacgcaacatctctagttggtttccttaattttattttcttaacccaaatagatccattggttccaacttcagttgaagtagtggtctgctggtaaatgtttaacaactggatctctggcagaaaaacaaaaaagtccacatttgtagcatttgccaatttctgtggggtaaatattctcaccatggcccaaaatgattccatgagacacagggttgggaaaagatgcccagtagttccactataaagataaaatagatgtaaataatctcacggttgtacataatagtgaaatgtagtgaaataatgaggaagagagatgagagatgtgttttgattatcattacttttgtttttagtataattagttatgaattaatttaatttttaataatgactatgtttaacaactaacttgcaaaattcctgggaattagcagttgactcttcccagacgagtcagctccagcacaagactgagttgaaatatctgagcagaactttgttttatgctgggaccctgcctgatttaggcaagcagcagtaagacagggaagttacagatgaagctgagaaatgactgatgggggaagggaggggttgaagtgcaagtgtgggacagggtaggtagaatccaaggtggaaagaccagcatgtgggtatggatcaaggtgcaccgcttaccagattctcagccccccaaacagtgggaactgtagatgtcacatgacttctgcctttttttgggacagctctgcccctttataacttttggctatttgggcacaccataaacgtcataaaggaaaataaatctggtgatagagcctcagaggaggaatttggtttttcaaatgagctttgtcaaatttccaggaaaacgataccaaggtctgaagttcgagttctgtatctcaggagtatgaatgtgtctagggggtttggggtgattcagttgggaaaaagggtgtagaatattattagttggagaaggtcaaaagactgatagagattgagaagacattgaacagataggagtgagtttgcaaatcagagtttttttcttttaaagcaaattttcttctaaagttttatgtctatacttattctgaaaatatggaactatgcatcagtgttttggcaaatatatttccagtatgaccagactgaaaatacagaagtgaggagataattgattttgaaaagttatactcatccatattttctggtagggttgagatcacatttttgacacactcagatcctggctatgtgctgtgcatcaggagatgtattaatagagcatcctaactgttctagataatgatgaagtgcctcttgaggctgcatgttccaaatctgacgtcaactgtgccaatattctgagagaaaagacaacttctaatcatttctcatgctaaaacagttccacagccattcttaatccatgaaatgtgtgctattgaaaaagaaacatggcttcccctatcaaatcagggaagatgttatttcagaactcataagtggatagatcattggctcacagtccagacattctaggagcaaaacttctgggctgaatggatcgatgggtagctcatacctaggaactatcctgaagcatttcattaactagtaagtcactgcaccctatagatgggtgtgtgtcagatcacattcaaaattggcatgtaaaagcaaaaacactgtttctatgatcccttcagttcaaaacaaaattccttttaggaagggatttagtctatggagtatctttacattttgaagtccttcccacctagaggaagaaagatggagtgacaatgagtgaaatttaatttgcttattctcatatattattttagtaattaagtacatttgtttatattttgtattgtgtgtggcacttcataatatataggattttcttttttcatccctccccagttttcaatccaatatattaccaatataagtagctgcaactactattatttgtgtagagttttacagtttgtgaagtcttatactgtttcagttaattctcaccataacccaaataggtggtcattagtcatcatattttatgctgttaaattaaatctagcctaaagctgcctcctttgcaacttcagcctaaaacattctccatagtgatctatagcctacctggattgtaaacagactgtaacctactctttaaaaagtagctgaatcccagccaatcccagcagccacactttgaccgctcagagatggccaactattcagaccatgttcacataaggcaaatgtggagccataaccaatctggctgtttctgtacttcgtttccattttctgtatgtaactttcctttttctgtccataaatcatcttcaactatgcagcaatattgtagtccctcttaacctatcctgtttggaaggtggtgggggttgccagttcatgaattattctttgctcaattaaactctgttgttaaatttatttgtctaaagtttttcttttaacaatgctgaggaacctgtattagagagcttcagcaacttgcccacggttaaacaccttggaagtgacataactgagatttgatctctatctgcctctgtatccctcacattcccactcatatgtcctgccacacatggaggtatggactgtcctctcctatttcttcggtatgattggatctgcatcttgcctcttcctctattttcagggtgagtgttctgctgcttttgttacaggtagtcagacaggcataagcggggcaggagagggctcttttcccctgcccgctaggaatgtcaggtgatcattcgacaactatcacactgtctctataaaaatgataattcagcagctggcaccagggtgccagggagagacagtctcctgatgatccatagctgttaacattattgtgttaaatgaatgcagatgtgagggggaagcaacttcctgggcatgcacattaagagacaaaatggtgaagtatgaccttccgggggacactccactggaaaagggaagaacgcctcagatggggatgcatacaacttcctaaacacattgcacgtgctcacctcctaagggtcaggaaggcactgcacatgtgggcagcccagcccacactaaggatgaatcataagagaggggagaacatacatgactgttccagttgctccatatcttcatcagcctttagttttgttctttttaatcctcacctttctcagatgggtgtggtggtccatctctttatggctttaatttgaatttccccgatgcaagtgatgttaaacactttttcatgtgcttattggccattcatatatcaccttctgtgcagtgtgtattcaggcctcttgtctatttaaacattttgattgtttgacattttattattgatttataggaatttgttatgtattttggatacaggttctttgccagatgtgtgtattatgattactgtcacatagtctacgacttgccttttacttttcttaataatgtctttttttttttttttttttaaaaaaaaaaaccttttaggttcaggggtacatgtgcaggtttgttatataggtaaatgtgccacgggggtttgttgtatgtattatttcatcacccaggtattaagcctattacccaatagttattttttctactactctctttcctgccaccatcctccactctcaagtaggccccagtatctgttgttcccttctttgtgttcacgagttcttatcatttagctcacacttataagtgtgaacatgtggtatttagttttctgttcccgtgtagtttgctgaagataatagcctctagctcaatccatgttcacacaaaagacatgatgtcattcttttttatggctgcataatttttcatggtatatatgtaccacattttctctttccaatctttcattgatgagaatttaggttggttccatgtctttgctattgcgaatagtgctgcaatgaacattcacgtgcgtgtgtctttatggtagaatggtttatattcctctgggtataaaccttgggattgctgggttgaatagtagttctgttttcatctctttgaggaattgccatactgctttccacaatagttaaactagtttatactcccaccaacagtgtgtaagtgttccttttctccacagtctaatgatgtcttttcaagagtacaaattaataacttcaaaatccaattataagtttcttatgatgagtgctttatatgtcctaagaaatctttgtctatgttaagtttaagaaaatattcacctatattttcttatagagaagatatccttacaattgtatccttaaattcattgtatccttaaatttattttattttctttctttctttattttttttttgagatggagtctccctctgttacccaggctggagcacagtggtgcaatctcagctaactgcaagctctgcctccagggttcatgccattctcctgcctcagcctcccgagtagctgggactacaggtgcccgccaccatgcccggctaatttttttgtatttttagtagagacaaggtttcactgtgttagccaggatggtctcaacctcctgaccttgtgatccgcctgccttggcctcctaaagtgctgggattacaggcgtgagccaccgcgcccgtcctgtatccttaaatttcttatagagaagataaccttacaattgtatccttaaattcatatgatacaattcttacaattgtatcatatgaatttatatttaggtttacaatacaatttgaattgatttatatgtatggtatgaggtaggggttgaggttcatattttttctctacctatttatctagttgttaagcaccaattgctgaaaggcaattcctttctccactgaattgctacagtggggatttattattcactcatcaaacaaccaaatttgcatttgtcaattatttttcaaggaagaccatctcaatttattaccttttgtcttctagatatttgacaaccattatatgccaccatttttatatttacatggcaatcagatatgtgaagtaatgaagaagtcagttgaggccatcatgtcctttgaaatttaagtaaaattgttttgaatctaaattcccaagacaattaaaagagaacttccacagactaccagtacacattatctacccccagcctttgcatccttttcattctgcacattagtctacttattatccacattcctgtctgaagccaaactcttcacttgaaacaccaaatcttactccattgctctacaaaatttcccatctatttcctgactcatcagttcactgaatcattttcaacagcatataattgcactcctatttttctatcctaagaaaagcccttctcatgtctccacttctcactaaatactttctctgtttctctttgcagaaaaattattttaaagagttgtctacatttgatgtttccagttcttctcctcctgttctttcttaaatatatgcaatcaccttcactattccacaaacattgctcttgtcaaggttaaaagtacaagaaaagtcacctatgacagcaattgctaaaaactagtggtcaatttttagtcttgatcttactagacctatcagcatcattcaacaccactcttcacttgactgttaggacactacactctgatgctttatcttctactttgttgttgcttcttctcagtctcctttgctggctcctccttactcctctgatctcttaaggttgtagtactcctggactcagtgctttttgtcttctctgttggcattcactctcttgtgcatcatactgttggttaactttgtataacctcatatgctgtcgactttcacatgcctctttcaaagatgcctgtgacttccttcctccaaaagttccctcatatattcatccatatttccctatgtttgtgagattccactgcccattttggactttctctagaacttcaactctcctgtctttattaggaaagattgttagcattctactgattcttcagcgctgcccactatagcatggaaccttcatacaacactacctcagaagaccacagtctggttgtttgttatgtgaaaatacttcctttgtaaaagtatagatctgataagtcattaggagagtatggcctggcaaggctgagcccattttatcccattgaaataatttatgtaagttaggactaaggaagggaatccaattatgagctattccacagtctctatagttcggcctatgttagaagttttgcatgatagttaatttgtaaaatatctgtcagggaacaggggaagcctttctctcagcaatccaagtgaaaaaggaagtatggcaattgataatgtaactgtcaatcttcctgagtaaaacagagggaggtaagttcccttgcaggggttctcagtttgggtgtttccagaagtgacccattaggcgaggaagtgagggcaagtagcttatttggaaggtttcccaagaagcactatcatgcacattttggttgtttctaactttttacaactgactatatacttggtttttacgtgtgtgaatattgcagtatgatacatttcaagaagtggcctgtgctggctaagtctatgtacacttaaaatcttgatagatgacaaaaacttaaatcttaatttaaaatctcccatactttaggccaccttttttcagggtcttttctcatgtcaccttttttcagggccccattcatctgttattttgcatcatctattacccccttcaacttcttacttctgcctttgtccaactcagatttcatggtataaaattataatcattcccatgagaacatttttgatgcttctgttctctctgtcatattcctttgcaaaactgcccatgagttaagcccaattgtccattcattccctccttatgctcaagcagctgaacataactagagaaaatcaaatggtattgtcatctggactcacttcaacttatgaccacaaatctcaaaggtgcactcagttcttccagacaattctgctacacatccctggtgaatttagttcccagttctcagtgatgactattttgtagcttcttttcatcgtccccacctcactgcatcttagcttgcaaatttgcctcatattttatagagaaattagatacatttgcatgagagtacatcttgtaaatatggaatttgccagtctatttgcttctctcctcatttactgtgatgcaagaggcattcctgctcctatcttagaccaatcctctattctatcactttgccttctcaagcagtttgcacctagaatcattcctactctctccttcattatgagtttatcctgttctatttttgatggccttttggattgttttcagttttttttcttctgtcattaagaacaattatactatgaacttttataatgtatgtaatagaatatttatggagaaattttttagggtaaatagctggaaatggaacttctgagggtagcagaatttgctagtgctcaccaatatctgtgttttcatttcctgtgaatacagactaagtttttcagcttcccttgtagttagacaaggcctttgagttctggctaatggaacgtataagcagactgatatttgccgtgtctagtcctggtccataaaaatgtccatgcagcaatccttactttctctccgtgtatgactatgtggattagtatactgctcccttcccccatgtcgtgagcaagggattaacttttattatgttaaatttctaatatttgaggtagctttagaaatttatttattaactttattacaaagttaactcaccctgacaataccctgggtcttagagaataaaatgttcaatttattaggtaatggcaaactgtttttcaaagacactcttatactctgcccaactgtgtatgagattttcttttgctacatatccttatcaacacgtggcattttccaatttaataaattttactaatcttatgagtattaagtggtatctcagtttgcatttagtttttatttccttaattactaataaagtcagtcaactttttatatgtttatgggccatttatatttccttttccaagtgtctgtttgagtgattttctgatttttccgttgagttgcttatcttttctttgtatgcattaaaaaaagtctttatatgtcatgaaaaccaatgctttgtcaatcatatatgctgcaaatgtccttttttttaagaatttgactttgggtaagattttttagatttaatttttaatttttgtgggtacacagtaggtgtatatattcatggggtacatgagatattttgacacaggcatacaatgtgtaataatcacctcagggtaaatgggttacccatcacctcaagcatttatcctttctttgtgttacaagcaatcttattaaacatttttagttattttaaaatgtacaataaattattgttgactgtattaaccctgttgtgctatcaaacattaggtattattcattctatctaactgtatttttgtactcattaactatttccactcctgcccctacaactacctttcccaggctctgttaaccatcattctattctctatctttaatttaatagatagatatctctatctatgtttaattgctctaatttttagctcccacaaataagcgagaacatgcaaagattgtctttctgtgcctggtttatttcaattgacataatgacctcccgttccatctacgtttttgtaaatgacaggatctcattcttttttgtatggctgaatagtactccattgtgtatatgtaccgcatttttaaaaatccattcatctgttgatgaacacaggttgattccttatcttggctattgtgaatagtgttgcaataaacatgggattgcagataacacttcaaaatatgatttcctttcttttgcttatatacctagagtagattgctggatcatatagtagttcgatttttagttttttgaggaactccaaactgttctttattgtgtttgtactaatttatattcctaccaacagtgtatgatgacttccttttctccacatcctagtcagcatttgctgttgcctgtctttggagaaaagccatttttaactgagatgatatgatattgcattgtagttttgatttgtacttctctgatgattaatgatgttgagcaccttttcatgtacctgtttgctaatttgtatgtcttttgagaaatgcctattcacatcttttgcccatttttaaattggattagtagattttttctatagagttgtttgagtttcttacatattctggttattaatcccctgtcagatgaatagttggaaaatattttctcctgttctgtgtgttacctttttactttgttgattttttcctttgctgtgcagagctttttaactggatgtgatcccatgtgtccatttttgctttggttgcctgtgcttgtgaagtattattactcaagaaatctttgtctagtccaatgtcctgaagagtttccccaaagttttcttacagtagtttcgtagtctgaggtcttagatttaagtctttaaccattttgacacaatttttaaatatgattagatagggatctagtttcatttccctgcccatggatatctagtttttccagtaccatttattgaatagactgttctttccccaatgtatgttcacagttttgtcaaagatgagttcactgtaggtgtatggatttgtttcttggttctccaatctgttccataggtctatgtgtctgtttttatgccagtgccaggctgttttagttactataactctctagtgtaatttgaagtcaggtatgtgattcctccagttttgtacttttactcagaatagcttcagctattctgggtgttttgtgcttccatatcaattttagggtaagaaaatattctgtgaagaatgtcattggtattttgattgggattgcattgaatctgtagattgccttgggtaatatggacattttaacaatattcattcttccaatccatgaacatggagtatctttcgattttttgtgtcctcttcaatttttttcatcaatgttttataattttccttgtagagatctttaacttctttggttaattcttaggtattttattttatttgtagctatcataagtgggatgactttcttatttttcagtttgttcactgctggcatatgtaaatgatacttttttaatatattgattttgtattctgcaaatttactaaattcatttattagttctagtagttttttggtgaaatctttacatttctccaaatagaataagatcatatcatctgcaaacaaggataattttgacttcttcctttctagtttggatgccctttatttctttctcttgtttgattgatctaggtaggacttccagcattgtgttgaataatgatggtgaaagtgggcatcctttttgcatttctgatcttacaggagaggctttcagtttttcaccattcagtatgatactagctgtgggtctgtcatgtatggcatttattatgttaaggtatgttcctcttatatccagtttttttgagggttattttttatcatgaagggatgttgaattttatcacatgatttttcagcatcgattgaaataatcatatggtttttgtccttcattctgttggtatgatgtatgacattgattgatttgtgtatgttgaaacatccttgcatccctgaatgcataatgaatgatcttttcaatgtgtgtggcatttggtttgctaggactttgttggggatttttgcatatcaaaacctatgggatacagagaaagtagtactaagggaaaagtttctggctataagcacctacatcaaaaaagtagaaaaacttcaaacaaacaacctaacaatgcatcttaaagaagtagaaaagaaagagcaaatcaaactcaaatttaatagaagaaaataaataatacagatcagaacagaaatagatgaaattgccaagtagaaaacaatacaaaatatcaatggaatgagaagtttattttttgaaaagataaaacaaaattgacaaacctttagccagactaactgagaaaaaaagaaagaagagccaaataaataaaatcagagatgaaaaaggagacattactaattataccagagaaattcaaaggatcattagaggctactataagcaactatatgtctttgtaaaggtctgaagtaatttagcacctttattttcagacccaatattcacactaagatcccttaccagggttcagtttgtttagaatgtgatccccaaggccaggaggtgaacccttaatgtgtataggggagggagggagatgagtccgactgatccagctctttcaatagcttgcctttagttaatggcctcgatgaatgctatgggttctctttaatgatgtctttcgtataatttgggcagtgtttttcctttcttatgcttctttgtccttctagtccttttcctttttagtaattcttcagaacttctcacttaatatttacctccttgtaatggttaactttatatgttaacttacagggtattttcgggtgagatgaacatttaaattggtgaactttgagtaagtagctctctataatatgggtggggctcatccaatcaattgattgcctgactagaacaaaatgattggcatcctttcgcaggaaggtattctccagccaactgcctttagcgaggaactgtatttaccttcccgggctgtcctccagctccagcctgccagcccatgctgcagcttttggacttactagtatccataattatgtgactaattgcatataatcaatctctctccctctttccctagacacatacgtacacacacacacacacacacacacacacacacactcattctattggttctgtttccctgcagaaccctgactaatacatccttagaccctttttgattggttatttctgctgttattcatttacattccttaaaatctcggttttgtcattgtaggaggaaaattagaagacaagtatcctcatttccacctggatccagtctttcttccttgttacttttattaacaatatcagttaaggtttatatggatgtcttgctttagcctgtacaaaaactactttgtatatgccttattttattaattttgctttcatcaaattctctgatcataactctatattcttgtaaggaatgctcagaattatactatttcactccaaattttatgattattgagaagaaactgggtatagaaggttgtgggaccagtttgtgatctattgctttaaaatttggtcaagtcactcaaattctctagctgtacctatgaaatagctttaatatttcaatcccctgcattttctttgcataatatggagtttgaattgaagtggtcctgaatttgagtgctgcatatgctacttttgagatatatgatcttgagcaagttgcttaatcacattaaacctcaattcactcatttttaaaatagaataaataatagctactttacagtgttgagaaaagaataagatgaaacagtttattaaaaacatagaagagtgcttaggacataataaagtctacataaattgtgcctattgttattactaataccactattatttttcttcattttttccttaattcaataaatgtttattaaaagcctacaatgtatcaggcactgccctaggtactttggaaacatcaatgagcagaacagaaaagaatgttctctcatggagtttatgttctggtggatttattactgtggaatgggattgtgtgtaataagatattttgtaagctattgtgttaataacaagccatctaaaacttgtgtccccagatgagatacattaaatctgcagatcggctgggtggttcctcaggttttggctgtacttgcccacatgcctgggggtctgtgggttgtgtctgacctgggatggcctcagcagggatgagtagcacaggacagctcagatcttctctctgtgtgtcaccttctagcaggttaacccaggaatgttctcatggcaatggcagaggaataagagcaagagtagaaacatgcaagtgctttttcgagcctctgtagcatgtctgccaacatcccctgggccacatcaagacacttggccagctcagagccagagtgggagttgcagtacaatgttacaaagggtgtggatacagggaggtgtgaagaattggaaccattaatgcaaccaatctatcccatctataaaacacaatttggtgtactgattatttgtaggtgtggatacgtacatagaaggttaattcctgagactgttctttaaagtcttgaagaagtagtatatgacatttatttctacgtgcgtggctagtctgctggaagtccagctttgaaaccaaacttcaagttgtaagaacacagtgttgaagatcaaaggcctaggttagctcagccagcaggttgggcaggcaagtgggagcaaggtgtgaactgtttccagaggtcagggacaaatgatgggtcaggaagttcaagacaggcacacgttaataggtggcctaattgtcaggcacctgtgacatcaccttgatactgaagcaactctctggcctggatggcggcatgagatgttagtctaaaccggggtcaggaaaacactcggctggagagtaggaccaagtgaaggctgctgggaatggacacagacatcatctactagagggggccactttatcatttcacttgtaaatgtaactcttgcctgtcatttaatgactatcatgtgcacacatgccttcttgtttacccactagtgatccatagcaaatctgctgcctactctcctaagacttgttgatatacctccctagcatttctctccagagagaagttttaatggtgcacctctgcacaggtgtgcctccagtgacttcatttgaccttttgatgagtagccagaaacaatgatgattcatgcctatgttccctttctttcaatattcaacatattggaatatgaatctactcttctgcatggtccttcaaagttcatatttttttcttaataaaacattttatgtacattatagttgatgttattgaaacatcaacaaacaaagcaaatattttgccaaagacgttctatagagctcattccctctgcttccatacctccaagaataaagctttttatcttcaggaagatggtttctctgctcagtgtttgaccagaaaatgaccaaaccgagatggaagctccaaatgggaggagtctttgcattgtgtctctgccagaggtaggtctaccatcactcagaagaaggactggtttgggccctaacttagaattgacatagttaagttattctaattaaggctaaacatggggttacaatcaaataatgggtcacagacttgaggcagaaggatgtatagtaggaacagatctagagaagaagccaaaactcttgggtaaaaacactaatatgattgcatagttacatgttataggagagattgtgttctctgaccccctgtattcaaatattgaactcctaacctctagtacctaagaatgttactttatttgcaaacggagttgttataattaattaagatgaggtcatgctggagtagagtgtgcctctaatccgttatgactggtatctttataaaaagggggcatttggacacacacacacgcgcgcacacacacacacacacacacacacacacacacgggagaatgccatgtgaagactggagttatgctgtcataaactaaggaacatcaagagctaccagaagctggaagacacaaggaagaatcctttccctacaggcttcatagggaatatggccctgtcaacaccttgttctgggacatctagcctccagagttatgagacaatacatatctattgtttaagccactcagtagtactttgttatggcagccctagcaaactactactttatgcaaaggctgctaactcttggataatgcctgctatagcattaatcaagcgtcacatttgttatgtgatggacaaagactgtggatggtggatccatgacttgcccttggaaactcattgtcagagcagctgtccacaactgttcaaaggttcattagtcatgcaaaggcacatggaatgcagtggatgctgctagtaccatggccaggttttctttactagactgaggacgtattccctggctgctgtgtatattgtctgcttttcctgaggattgctgtcagtcaaatagaagcccctttactatgtctttcccttcccattttagtgtgaagccataaaggagtctaactctgtggtaccatttgtgctccagagtttcccatgggaccaggctgaggctagactccagctgaggccacatcctcgctcagctcctcctcattccctcccctgtttccctcactccccttttgagaactcatgcccaataaatacctgcctcagactgcgctaccggggtacttgactttagaccttatgcttctccttcctcaataaattacaaagagtgggccattgcatttaatagagaagactgggggaaagggagaagtggctcagggtggggccatggctacatgaggccaggtgctaaggtgtggaacctttggggtggtagagttgaatgtacattagcactctttcatcagctgcccttacagtgtcatcatccaacaatcatgtctgtctctgtggtcattaagggagtactgacgttgttcccatgatgatcttctcattgattccatcccaaccttttcaaactagagccaggtgggcgagaagacttgtgaaagacgtcctttcccaatcaggtgattgatgggagctagtctggccagggtttgctcctccagtggtggccttgcctgacctgtgtttttgacattggcatttgccagcaagctgagacccactccacttgacaaaggaaccctagtgaccggtttacctcaagtgaaccctcagcaagaaagggcagagaaggcaaggctgggtgactcagacaccctgggtgcatcagttaaaagagaaatagagccttggagataacaaaagcagtaagagatcttaatgactgaagttaaaagaataagacctgagaaagaaagcctaggcaagaacgatctggaatatgggtttcttgggcactttttttttttcagagattcattttcaccatgtaacttgccaatctacaattaaacaatcctgactgagtgagagttcatttatatttaatttatgttaagtatattatatagttcatttgtgtttaactttttttttttattttgagacagaatcttactctgtcacccaggctggagtcagtggtgcgatcttggctcactgcaacctcctcctcctgggttcaagagattctcctgcctcagcctcccaagtagctgggactgcaggtgtgcaccaccatgcctggctaatttttgtatttttagtagggacggggtttcaccatattggccaggctggtctcgaactccttacttcatgatctgcccacctcaccctcccaaagtgctgggattacaggcgtgagccaccatgcccggcccctgtatttaacttttatatgagtaacaggagaacatagctcagacttctgagttcaaaaatattaatattgtgaaaagttagtgtcacttttgccctgtcccccatcagtcagtgcctctcgttagatggcagctttcttagagtttcatgagtatccttccagtgatatatatttcatgcatttatgaatacatgtgtgtatgaacgtttataaccactcaaatgatagatatgttcctgtccagcatcttgctttttcacttaaccttataccttaaagattgttccacattagtaattgaggcctccctattgtttttcacagttgaatatgattccacagtacagatgtgtcagatttagttcagccaggccctatgagtggactgttaggctgtcttcaatttttgcctgcaatgagtatccttgctgttatattgtttgacatatgtgtgagaatacctatgagctgttggcctagacttgggattgttaggtcaaaatatatgtgcacttgaactttgacgtgtaatgccacactaccttccacaaaggtggtgctgacttaaagtgccacctgcattttatgtgaatgctcgtttagctacccaggggtgaacaaatgaaggctgcctatttttgtaaatgaaattttgttggtgcacagtcaggtccatttgtttatactgcctatggcagctttcaaacagcagagttgagtagatgcaacagagagcatgtgcccccaccaaagtaaaaaatatttactatctggtgttttacagaaaaagttttctcttattcacaatagcgaagatatggaagcaatggaagtgtccattgacagatgattggataaagaaactgcggtatgtcctgtgacatgcaacttacatatgtaacagacttacacatgcacccttgaaaccaaaatacaagttaagaaaaagtagaaagtaaatccacagaaattagaaatgataagatgcaaatagtcatcaaaacagaggaacttaaaggaataggaaactactttgctcaattctctataaacaaattgaaaagctaaaaaatgaataagttattagaaaaatacaatttacaaacactggccccagtaaatatacacacaattgccatcagatttttattttacattttaaaagcatttgccatccaattgccatcagatttttattttacattttaaaagcatttgccatccaattgccatcagatttttattttacattttaaaagcatttgccatccaattgccatcagatttttattttacattttaaaagaatttgccaacagaaagcaccaggttcagatattttcacaggagaatgttaccaaatcttaagccatcaaatattattttaccttttcagagcacagttttacaaaaaggaaaattccaaattcatttcctgaaacatttccaaataacattgactcctaaatcacaaaactacatttaaaaaaggaaaattatgtttatcacagcactgttcacaatagcaaagtcatggaatcaacctaagtgtctatcaataggggatcagataaagaaaatgtggtacatacacaacatggaatactatgtatctgtagaaaagaatgaaatcatgtcttttgcagcaacatggatggagctggaggtaattattctaagtgaattactgtagaaatggaaaatcaaataccatatgttctcacttgtaaatgggagcaaaaagatgcatacatgtagacacgaatggaaacaatacacactgggaactccaaaataggggagggagagaggtgagtgtgggttgaaaacctacctattaggtagtatgttcagtatttgggtgatgggttctctggaaacccaaaccccagcatcacccaatgtacacatgtaacaaacctgcacatgtacccccgattctgaaataaaattttaaaaaagctgtggtgtatacctacaatggaatattattcagcatttaaaaagaaggacatcctgccattttcacaataaggatgaacctgcaagatactatgctaagtatcttgctaaataagctagacacagaaagaaaaataccacatgatctcactcatgtgcgggatctgaacaaaaaaaggacaaatatatagagatggagaagaaaagagtggtcacccagggttgtggggctggaggagtgaaaatggggagatggatgtcaaaggagacaaacaggtatgtgacatcaacaagtctaaagatctgatgaacaacatgagaactacagtttataaaattatattgggttcttttgttaagtagattttaactgctcttgtcacaaagaaaagtaactgtgagatgataaagatatattaatttactttactatagaaaccattttactaaggatatgtatcccataacatgttgtaaaccgcaaataaacacaataacatttatgtaaaaaaaaactttggtgacccctgatacgtactctatcaacacaatgatatcagactttttgatccttgccgatatgagggaagaaaataggtgtttcattttttatgaatgaggttgaaattttttttgtattttctttttgcacaccttgtatttgtatttttttacctcttatttttttcttgaggaaatcagctctttttcagtgtcatgagtaggaaatatgtcctcctatttgttgcttttctttttactttgatcatgaagtttgtttttagcatgcagaaatgttttttacgtgattaaatacatcaatctattgtgagttcagattttctgacatatttataaaaatcttacctatttttttttattttttaccttttaatgtttatacactggatccatttggaattttattgtaaaatgtgatgcagtgatgaagtcttattctttctccagaaggctagtttgttttatgaagtccccttttactgaagagaccatattggaaaaactaattagaaacatcatctttatcatgaactaaattctacttttatttggctctgtttctgagtgtttattttgttcacttgatcctcactcttttaatgattctagctttacactatgttttaatttctgagggctagtttcccctcagcactttttttttagaataaaattttctggctatttttgctttataaaattttttcatatggtgatttgaactaggttatatcctttaaaaacaagctttggtatttcctctctttctcaaacccctgcctctgtcatgagaacaaactcaaacctatgttgccttctggatgatgagagaccaagtggagcagagaggagaggagtcatcccagctgagacctttccagaccagctagcctgcagctgactttccagctaagacaggagtaaatccactggataataaatagtcctggcccaggttagcagaattgctcagacaacctatagggcagtgaaaaaaaaatgcttattgtcatatgcctttgagtggtgggtgcattattgtggcaataaataactgataaaagaataaatgagattacatagggagactgcacatgcagagaaaaaaaaaatggcctgagctggaagccaagggtacactaatatggaaaggcccagtggaagaactcagatgtggtcttactttcaatttttctcttacttttttttttttttttttttttaactgaagaaataaaaaatactttttaaaaaattatactttaagttctagggtacatgtgcacaacctgcaggtttgttacatatgtatacacggccatgttggtgtgctgcacctattaactcatcatatacattaggtatatctcctaatgctatccctctcccctcccctgaccccacgacaggccccggtgtgtgatgttccccgccctgtgcccaagtgttctcattgttcaattcccaccgatgagtgagaacatgcggtgtttggttttctgtccttgccatagtttgctcagaatgatggtttccagcttcatccatgtccctacaaaggacatgaactcttacttcttaataataccgatatgacgatgtcttacttagaacaagtaacattcaacggatatcagcagtgggctgtacaaataactccagagagtgacagacaaaattctttcattcaattattcataaacttttaataagtgtttctgcatgcctggcatggttaacttttcaaaaatgaaaatgatatggttgaagtaaccgaagagctcgcaatccagtggtgcagtcatacaagatgtgaaaagtgtgttaacagaggttaactagggccctgtcgtccttagctctgattggaagagtctggagagtattccagtctcggagtttcagagttgcattcaaatgaagcaaaagtaaaatcaagcacataaagaaaatatacattgagttctgacaaaaagtcagaaaaccgcactgtggctaagactgaccacagcccattgttgatcaagaccatttgctttctatttctcagccgtctttgtagttttgtgagaccctttgactgaattttagccaatggaatgagcaggtccaccaaaacctcctccgtgtcatcctcttggactcttttgccttcttctgaatgcagtggagtcctctgatgttggaagccacatgttgaagatggcagagcaatattatagaagtagctgggtccctggttgcccagaacccagcatgtcttagaagcatgcggcctgcttgtcattttgcacttcacatgagcgagaaataaacttctgtcatgtttgagccatagtgcatttattcattgtgacatacaatgctaacttaactaatatactgatggaagaaaattgtactaaaatctgccatgctggctggcattgctggaagatgcttttgttacagatattgtgttaggcgacatactttgactcccctaaattcaaaccaggtaacaacaacccatgctatttaagtaaactacaacatacacaaagtagatgcagagatgttctagaagcagatgggttgctctgggtaaacttagtttggaaagctccttagaaaatgtgaatcatcagcaacagaaattaccagcagggtaaacagacagcctacagaatgggagaacatgttctcaaaccatgcatctgacaaaggtctaatactcagaatctataaggaacttaagaagccaaaaaaattaaaaaaggggaaagtacatgaaatgacactcctcaaagaatatatacaagtggccaacaaagatgaaaaaatgcttacttcactaattactaaagaaatgcaaatgaaaaccacagtgagatgtcatctcataccaatcagagtggatattattacaaagtcaaaaaaaagcagatgttggggaggctgtggagaaaagggaacacttatatactattggtgggaatgcaaaatagtccaggcactgtgaaaatcagtttggagatttctcaaagaacttaaaatataaccactatttgttccagcaatcccactactggatatctatccaagggaaaataattagctctactgaaaaaacacatgcacctgtatgttcattgaaactctaatcacaatagcaaatacatgaatcaacctaggtgcccatcaacagtgggttggataaagaaaatgtggtgcatctgtagcatggaataccatgcagccattaaaaaggctgaaatcacatcctttgcagcaatatggatgtagctggaggccactatcctaagcaacctaatgcaagaacaggaaaccaaataccacattttctcacttataagtggagctaaacattgtgtacacatgcatgtaaagataggaaccatagacactgggcactggggactaccagatggggaaggtggtaggtggttgagggctgaaaaactactcattggatactatattcactacctgggtgttgggatcatttgtaacccaaacctcaaagacatgcggtttactcatgtaacaaacctgcacatacacccattgaacctaaaatacaagttgaaaaaagaagaaaaaggaaaaacactgaagagttttacaataaaggtaaaacagtgccactcttctcacagattttaagaaaatgttcatttttttatgaaccatatgttcatgttagcatataatgggcttatttttgttaaaaaaaagggaaaataagaatcataagcagcatattgaagagggaagggactattacactaagaaggaagaaagggcatttgcagagggtggagttttgatgttgtttttgacgtcaaagatccaatgacctttgatgattatctgtggaataacctagattattgataaagctatacagaaaaggtactctaggagaccacccttgctgcttgcatcacatccctttagcttgccttgaattttagctgcagctgtggcaggcccttcctgcagctgtcagtgttctccttcaaggtgtgtagctgattactgtcccagtaccttctcccacacctggcagctccaagcgaagccccagcatgtggagttagtgcccttggggtcaaaccttagccaaaggggagggtggcaggaggattaatgccccggctttccatctcttaggtaaacaatccttggaagcatttggaatgcttcttcggaggtcctagtggcatcatttcccttacctatagcagtaacttcaacaatgcctcctttatcagcattccttccttcctttttcgttttctccacttcctctattctagttcctgggatcacttcccatgtaaactaactgaactgaagtctttgtctcaaggtctgccttcaagtgaagccaaactagggtactatgagtaagaatttctgcaaatcctttttacttcctgaacaataagtccaattacaatttttgtctttggaacattacgtttattttgttagaggcgcagcctggattctgttcctaatgccagcctttgtcttgcttggaagtctaagatcttatgacattatgtctaatcattgtagactaaatattatttgacacttaacacacatatatattatttgtgccaattttaagcaaagatttaccgagcaccttctcaataccaggtgctgtgcttggcactgggattcaattttattcattcagctttatgacaatactccattaattgtgctgttctagagctgggcatattctttgcaagaaagcatattatgcttctaggaaaggtatattcctttttttgagctgtcaacccttgcaaaattattttattcacttagatatttagtttaacttttgctattgttataattttctgttttttagttctggatgtactttccttattcttttctggacctcactcataatggacttactactgatgcgggatctgccttgtctttcttaaagctagaaaactgtctcgcacatgttaagtgctcaaatttttgtttaatggggctggcttataaatgagtccatgatgatttcttaagaatcaaatctctttggatggagtgcatgatatctaaattcttatctacaacaaagaagctgaaataaagttctggaaagccagcggactagtccccagtttttctttattttctgacaacagaaaagcttcaacagattgcaattgacaaaaacatggcagaggtctttgatatttttttattatgtttttcttctttctagtgaatttcccaggagtcaactgcctcctctcctggctttcagtgtcttaggatgccaccctgatctgctgttgctaagagtaactcgtgctgccttgtctcctctctagtaacacacagcacatgcatgttctgttctgctctggctctgctctgctgcgtttatttttcaccaagccttgttttactgataagcaaagtgagtgaagagagattcatgtcttgccccaagtcaccgagctagtagtcgatagagctgggatccgaattaaggtagtctggctccagagcacctaacattgtactgtatctaccactgactctttctatgctctgaaaacctttcccttttcagttacattcctttttttcagagtatactaccagctaagtgctggctcatttgtctgtaatctatgtggatacacatagtgctttaacctagcacgctgtccctagtggtaggaatttctggcactatggtggagtaggattagacgttttagggaaaaattgtcctttcattgtcttcaagcttgttctgtgccaactgcccagttgaattgaaggtctcggattttaggattgacaaagatacccaaatcctccaattggcctgccacacacatttatcagtcattagcagatctttaacttatttagaaatctagccagataaagagagtcagaaaataaatttcgtagaaagttgaaagttcttttagctttcactgtgaacctctctctgctggtcatgtctttaaatacttgaagttgtgtctttgttccattctttgccacttcatgacattttggggccactgagaagcaggtaccatttcacagatgtggtgaggggtggacattaataagaaatactatttttttaactacttattcattggctgaataaatacgtattgagtgccatcttggtggaagacactgggccatgttctgtgaggggatagagagacgtaagaagatctgtgctctcatatttgttggggtttattttagggattttaactgtatacattcctccttgagattctgaactagttgagaaataaatacagaattaagtttaggataaaatatatcagttttgttgctggccaggctgtaactacatggctccatgtagttattaacacaatctagctccctaattttactcatagtcttactcagtagacacaagtggcagacactgaagccctatctcggtgagattactctccactgggagcacacataatgcaagtaggttggtcccagaaagagatctcagaagggatcacaagtctttgagtctcattgttgagatagatggtcactctgtttcccttggaagaggagtgagcgggagtagagggagtgaagaaactgtcttcccattacctctcatgactccaagttcctcttttatcaaccaaggtaaaaattgggagaaaatttttttcctaacatatccatgaaaagacagttaactatataagctaatatgtgattatgctctgcaaacagaataaggatgaagcttgtccttacatcgcagcatccctcagggttcttggtgtgttcacagtgatagcaaacaaatttgtaattttctatacattttattttgcactaacaacctctttgtcttgctagacttttcaataagtcaaagatctgctaatttctaacaaatgtatctgccaaagtggatttattagaggaatgagtttcaactgtgttgctcttctttaaagagagttttgttagtttactctttggatggtactgagtactgtgtatcatatcaaataagaagggggagaatcagaaaaagaattttcagagaccttaatgtgcaactgtgaattgtggctgtctaaagttgggtataatgggaagcatttatcaagcgtatttctttacaaaactcttctagagaattaaacaggaaaattaaactaggggattaaattaatgtgctgtggaacacacttcggaaaatgggtaagggattcagagaaaggcaatatttatgaatataagaaaagtcaacaaaggctttaattgtgaaattttactgggcattaaaatgtgggagaatctagcagaaaagaaggaagtaggcatgtcagatagagaaacaatattggctcagagtcactggaggagaaatgaaagaattaaatcttttttaaaacaaaggggataaatgtcactgtacatgagattggtattttgaaaagtagtagttttgttcattatacaagtaatttttgtggaaatacacataacataatttcagcaccaaaaaagcatttaaaaatatgtttgacaatttatggttttgccattttggcaatttaaacaaatagagaagaaaggagtaggtggagtaaatgtgcatgcagagaagatagacttcgatgagccatgcagtcaagtatttgccaggatctttgcagccatgccagcctgtgacctctgatgaatggtgctcatgttctgtaagagtgccccaaacagtagctactcctcatatttttctgcacagtaaggctaccatttcatttcatgtttctcattaagctgcctttggccccacttctattggattttgtcatgtgtttgcatctctcctgatctggacatcacctgaatcagttcagcttcggatacttaggggggactgctcagttttgttagcattccaccaaccgttttaagaaaaaaactaaaaactccttgatgaaggcacggtgtgctgactagtgtctgtggaatcaagcactctcatctgctttgggattttaattacctaggggtgctgggtacattcaaatgacctccctcttccatgagctcatcctggcagtacaaagcaagccacccaagaaagccaatcgcagataattgccacgggaacctgaaggcaacaaacctgctcctgtgggactgggctttgcattgacttagcactggtcagtgttccttcattgtggacgcacccagctcaagtggaggtgaagtcaccactgctctgctatggacttcactgttcttttggtagctgaatatgcccataaaaatgataatttttggagaaatgactgggctccccagatgtttttcaatatctatggttaagcatgatataatttccacgctgtaatgtggcagtgaatgctgaccttttttctcttttcttcagaattgtgaaaatttcaggtatgacatatcttgtattttgtctctagaattttcatatttagatttagatgacatttattgaatctctactaggtatcaagctagatgttttgtgtttcctttctcatttaatcttcacaactgtcagaggtgtttgaaccagagcagctccatctttagctgagtaaaatgaggctgagatctgctatgctggattcccaggaagttaggcattcctagtcacaggatgagataggaagtcagcataagatacaggtcatgaagaccctgctgttgcaacaggatgcaataaagaagccagccaaaacctgccaacaccaagatggtgacgaaagtcacctctggtcctccccactgctcattacatttttacaatgcattagcatgctaacagatattcccactggtggcatgacagtttacaaatgctatggcaatgtctggaagttaccctatatagtctcaaagtgggaggaaccctcagttctgggagttccccacacctttaccagaaaactcatgaataatccaccccttgtttagcatgtaatcaagaaataacaataaaaataggtaacagcagccctcggggctgttctgtctatggagtagccattcttttattcctttacttttgtgataaacttgctttcactttactctgtcgacttgccccaaattctttcttgcccagattcaagaaccctcccttggggtctggatcgggacccctttccagtaactcaacagccttgtgacatgatattgtttctattttgttgatgaaaatcagacaaagaaaggttcagtaacttgcccaatgccaaacagcctgtggtggtgtgaggcactaaagacctccacatgacctgtgaatgaggccactgccagaggctagcaatagccctttcaaagttttctaactttcctttttagattaaaaaaagtcaactcttttttggtggtttttgttaacaaggtcatgatggagttactagcataaatactaaatacatttttagggggatgctcaggttcaagacatcccaacaagaacttcctgcaatcacgtggtgagatgtttttttgctaaccagcatcatggcatccttggaacttcgtggggattactaagtgatgaagccggtctgcctgcccctcccttgtcccctcagacatttacatgggctccccctgataactgattcaaacctgaactctcccatgcagagtttaagatccttcaaatctttgcctcacttttccttcaactctgtgtctggtccctgctgtgtccaagggagaactttctgcttgaccctctgaaggttcactgaaaaaatcactgatgtggccagggatggcggctcatgcttgtaatcccaaggctttgggaggctgaagagggtgtatcctgaggtcaggagttagagaccagcctggccaacatggtgaaaccccgtctctactaaaaataaaaaaattagccagacgtggtggcgcatgtctgtaatcccagctactcaggaggctgaggcaggagaatcgcttgaatccagaggctgcagtgagctgagatcacacaactgcactccagcccaggaaacagagcgagactccgtctcagaaaaaaaaaaaaatcactgacgtgaggcagattgattaataaaagacatactaattttttgaatgtgtatacacaggagccttcagaatgaagacccaacctcccaataaagtatagagtcttatctaccaccttgaggttatagaaagaatgtgggctcagaacgtggcccaaaacatgttttagtggcaaggcaggttaaggaaagtgacgtggtttgactgtatccccacccaaatctcatcttgaactgtagttcccaaatcctcctgttttatgggagggacccggtgggaggtaattgaatcatggtggtggttacccccatgctgctgttctcgtgatagtgaatgaattctcatgagatctgatggttttataaggggctttttccccttttgctcagcacttctccttactgctgccatgtgaagaaggacatgtttgctttgccttctgccatgattgtaagtttcctgaggcctcctcagccctgtggaactgtgagtcaattaaacctctttcctttataaattactcagtctcagatatgtctttattagcaacatgagaatgaactaatacaggaaggaaaaagagagaggcttgactagcaaaggtggtcttgttatatagatgaagccttacaggtagaattccttagagagaatagatggaaaactcttcagacttaaaggtgtcagactctcaatcactcctaaatctgggaaagtcctagaaagagaaggcctggctgcactaatgaggattctctatgaatacaaattttccccacctcagtctactggccctgcagcagccatttcaaaatatgtcaaggaaatatattttggggtgaaatattttgatttccttcactgcccaatggttgccctctattctgaacaggtagaatccttacttcctctgcaacccccctccacaatgtccgctttgactctctttatcctcctcatccttccaggcccgacctaagtcctgtttggtctggtaagccatcctgagagattctcctttctcggatacttagttttcaaatggccctggagtttgaggtttctggggagtgtgtcttagaggacggggagacagtgggagcagagtccttgcttctcactccagccgacactagagcagccatagtttttctgtttgatgcataggaactctgcttcagaaaagctccccatttctcattttgatgttgtgtaagcaccagggggtggtggtgtcagtagggctcctgaacatcaggttttggatagaggtgttggctcaggccagaaacatgccacaggtgactgatctataaaaatcagaatgctaattcattaatttagcttgggaaatataacaccaagaggaatggaatgccttagtcagcctggctagggcacttgttccctgaaagcaagctaactatctgggaagtcaaatgatctcctgggtatttgttggagaccacagaaacagaaccaggtgtcatttagacttagcaatgtttctgagccaacgtaaatccacacactctaaactagtggtcctcaaatcttagtttagatcacaatcatgttgatttgggtcccactcccagagtgcaacatgtgtgtgtggggtgtgtgtatgtgtttgagaaggataagaatgagcatttataagaagttcccagacgatgctgttgctgttggtctggggtcacactttgagaagcattgctctctttcattatagggaaacatagtgcttgtatgtacaaagccaatatcatcccctctcctctgggtattcctgatggaccttgtcaactttgaactattttttcacgtgatctaagatttactagcttgtaattccattacctttcttcaaacctctacattgagtcaatataatggattattttctcttgaccacgttacaattgcaccttagacctgcatctctgaaattacttccagtccacctatctgcctcagaagagtgttgggtgttctctaactcctttgttgcacacttatacattatctttttttctctctcccactccttccacatacacacacacaccctgagggctaaatcttgcagtatgcatattttactaatttttgtgggaagccatatttcttttggaggagagatgtccaggtttattttccttcatgtttctttaattccattttcccaccacagccagtagccagtaaatgtgaacaatgatgctctttttctgcctatttttgtcatgaggtaataaagtggaagacacttggtagtaatttaccaccgatagtgatttcctgcctaaaaattcaacaagagcgtgagtcacagtgtcatggacatatgaaaataagctgtgacccatatcttgagagtaattggacccaggctaatgaggaccaagtggttgttgtacacagcctaaatgcagtcattgatgctttctgctttgcttctattatcttttaaggcttcctggattgctgactcagctccccagggaatccaggcagaatttaactatgggatccattatgggaatgttggacttgggggactggcgtagatacagctggtgactatattttaagatgagatcaaatactcaaaatattagagaagaatttttatttttcagtttaattgttttaaatggtttcctcgagcccaggctaaaattttatcatatacttacttggcatgtggttttgggtgacattataagatctccagtgtcagtaaatatgataaggcaggtaactaggaccctaggatcctctatttctcactggatgaccttagtttaatgggcatggtatagtagattgggagtggagatttgtaggcattgtagcaaccttttagttaagatgttctgtgcaaatttgtgtttgttccaagcccagacaactaattagctatgattattttatcattttcttgtgttgtgagaagccaagaggctcttcctctttcttcttgtttctaatacactgggtagtcacttccttcttaattcttgctcccatctcttctatcctcactcctgtttcctgccagtctttgtgtttttctactctcattgctcctaaagtgatctgcctgtcatatggcacagaagacaattaagtgaagccagcttggtgggtgacaggtggatactagaaaatcaatcaagttggggtggatttgtactgtgtcaacttggcatgactgaaattgcattcctcagaatttccttccttgcatggttctgagttaaaatgagacacaagagacattttgtgaaagatttggaaggcaaaagtgaagcaacagccaaattatttttatccttgggaggtctatggatggcacctggagcagttgccactcatgcatgccatcatttatccacaggctcgtcctcatggctggtcctgtagctcctatggctcctgtggatcctccctcagctgccccacctcctggacccggtgagagtccagttccataatgagtgaagtccggcaggacacactgtcatcgaaggtggaggtttgaaagagatgagagagtaatatgggtttgatctatctctgaggattctagcccatccttgctggttccagtttgtctttgctctccccactccacatccatgctttctttctgattgctgaccctgctgactttagatgttagcaacaggtgcagaaagtataggcttgtataggctgtttaactagctcccaccattgtgtaaatcaaatctctgtaatatatcccttattagctatctcctggtggttcagcttcctttatcaaagaatcatgtgtaggatctccggttggaatcaatccacggggaattcagccactggattttgagattgtcaagcacccaatggctattgtgggagctaatttgggatgtccaagtatctgaatctgaatgagaaactagacattagtgacagattccactgacaggcattctttgcaaatcaatcctgggaggacagttcctaggtcctgctaagccactctgcaaattggctttaagactcaggacattttaacaatggaggaataggccgggcgtggtggctcacacctgtaatcccagcactttgggaggccgaggcaggcggatcacgaggtcaggagactgagaccatcctggctaatgcggtgaaaccccgtctctactaaaaatacaaaaaattagctgggcgaggtggcgcatgcctgtagtcccagctactcgggaggctgaggcagaacggcgtgaacccgggaggcggagcttgcagtgagccgagatcgcgccactgcactccaatctgggcgacagagtgagactccatctaaaaaaaaaaaagaatgaaggaataaaatttcttcaatggattgcatcttaggtctggaaacttcaataaggtagatgctatttgtgaagctgttttttgtttttcttttgagcccctttcctcccttccccatttttcagttttgttaatgtaaaagaatagacaggaagagaaaaataagttacttttgctgttgcgtttctccctcccctctctctctctccccctccacattactcatcaattcacagtcccaaagcataggcctgcaaccattaaatgtggatattgcttcagtgttaggaaagctgtcaatgttggagaaagaatgcaactgttaatgtttgtgtaattccatcttgcacttgggcggttgcttggtacaataatatttctgacttctctttgatcctcctctctctacctagtctcatacttatggctttttctaaagaggtaactagataaagaaaattgtattttaaagccaattcttccttccatccttccctgacctcctgagtttcatgttttgggagaaaagcattttttgagccatggtttaagattaaattatatgccctcaattcacctttataattcagaaaagcccaatacaaaaagatccccagaattcttctattctaagggggaaatttgactcttaagcttatttgtaagtttaggttacgaaaagccacttcaaagcattggaaatggcacgaactgacaaggttgaaacatatagttatatggttctgcttcattgccttatttctttcctcagagctattgtagacaaaaccaagcagaaggtatagtgtttctgatactctctgcttctggaccccgctttaggcagatgaccctattacctcagccattatcacatctttttgtagggctcagttaataataaataaaaaacccagcaaatgtctagcattttagaatttacagggtgcctttaaatgtatcatctcatttaactcttacaaaactttatggggatggtattattaatcctattatgccaataaagtaagtactaaaataggaaacattgaccaccatatttctgggcagcggggtggggaggagtggaaggggtttgaatgtgagggtttaagctttaacaagagtacttcaggtttcacctgaatgtttggggaaatatctttctgtagattcaggtccttttctctatcaccaaaataaattccataagataaataacagcgccacttgtgacaagatatcttctgccttctttccttaatttttcagctacacaaagagtctcaatggtagaagtaggagattcaccagccctgagtttgtgataatctcgggattggggacaagagagaggataacttatgtgtctaagccatacctcctgaatgtggtctagaacatgctttctcttccctgcatgtgtcagtgttaaatttgccactcctttggcatttctcccattaagaggtggaatctatttctcctcccctttaatctgggtgagcttgtgacttctttaattaacggagtacagaaaagtaacaatattgtacttttgaggctaggtcacaaaaggctataaaattttcattttggtttctaggaatgctctcttttggagagctgtgcaactctgaggccaccatcctataaggaagctcaagtcacatgtatgtgtacaagatgtcatttaaacctcatctaggatgatagaacacataagtgggtccagatcacattctagagtaccagctatagtgaatttcttcacttcttagattgctcataaagggaaggctgaaatgagaatcactttttgagcttaagaaaaagccatttcctctatctacctacctacctacctacctacctacctatcaaaaattctatctatagaattactagagcagggggaattacattagatgttagaggataattggatagtaccatgatagtggatttgggctagttgtcatttgaattgggaaagagagctacagggaggtttttggacattttctgcatgtctttttggccataccatattatatttaggcaatgtattagagttccctagagtaacaaaatagtaggagatatacatgagtttattaagtagtattaactcacatgatcacaaagtcccacaataggctgtctgcaagctgaggagtaaggaagccagtccaagtcccaaaggtgaagaacttggatttcgatgtttgagggcaggaagcatccagaatgggagaaagatgtagcctgggaggctaagctggtctagcctgttcatgttttctgcctgctttatattctagccacactggtagctgattagatggtacacagccagattaagggtgggtctgcctttcccagcccactgattcaaatgctaatcacctttcacaacaccctcacagacacacccaggatcaatactatgcatccttcaatccaatcaagttgacgctcagtattaaccatcacaggcaacaaaagcaatagcccagttttggctgacttattaggattaaagattttcagcagagtttccttggttgctaccactgaagacaaggccatggaataaatccactttaaaagaaagccaccttttcattatatacgttgtaaggtgatggcaggtggtgcagtgtttctctgaacatccttaaccaagtatctgacatgctgatgtgttatgattagttatgagaaggaagttgaattgtagctttaacttggggaagtatgaaaaactcaagcttcttatttgggtgtggctgtatcccacaatctctgtataccatgtgaggattctcactcaaatacctgtttgaggtatttgaggtggaaaagagtttgagaatccctgtgatgtataagttatccttgtttgcattgtgtattttggtcttatttattacttattgctcactccagatgtcttgtatctacttaacaaggctggaagagagaaggagacatgtatcatgcccactaatgctcctctctccaaaggtagcctgcgttcctacttccttcaccatagattagctttgtctgcttttgaacttatcataaatggactcatttagtacacgctgtttttttgagcctgttttcttttttttctatttttttttagacagagtcttgctctgtcgcccaggctggagtgcagtggcgtgatctcggctcactgcaaactccgcctcccaggttcaagcaattctcctgcctcagccttccgggattacaggtgcccgccaccacgcccggctaatttttttgtatttttagtagagacgggggtttcaccatatttcccaggctggtttcgaactcccaagctcaggcaatccacccaactcagcctcccaaagtgctgggattacaggcatgagccactgcccccagccaagtctgttgagcaagtatttgttgctcagcataatatctctgtgggaagtttcgcatgcccatgattatattagaaaggagtatcccaatttagctttcagttccttttttccttcttgcctccctgagccagtgggcagctccagtcactaaggagattgggttgctgtgtgggggtagccattgttaatggcttgtgccattacttgtgggattagccattaacaagataaagcacagaatatgatttgaaggaacagacttcctccaaattagctggctcaggacttttctgaaaacataagtcaacttggtcacataagcagggcctggcttggcctatggggcagcacactcttacttgcctggtggaccaggctgtccgcgttcttttggctggagcagaggcagcaacggtgtgagatggccagcatcctggcagtttgacctgattggatgaggttccctaactctggaaagtgatttccagaggatggaagaccaccctgtaaatagtccactgccctttagctttcctatgcctgggagtgctggggctcaaaagacatcagaaatttattgtcttttggaaagctgggtttgtaatgaagaagaaattttgttgttctttttgtgtaattatacagtgtgtaatctctggatatatcctttcaagggtattaattataagtctgtaaagaagaggtatgagggagcaagctgactcccagacactctgaaaaccaaaattggatcaaaccaacccatctgtgtgcataaaaaagtggccaccttggcacactctgtcaaagctcaggatgctctattttaatagcttattttgacctaaaatagtttttcctttaaacataaacttttatttgggcttttcaaatttcctgctttttctatgtatgcaagtatccttagagtcaatcttgtatgtgcttaaggagtgcacaggttaaaataaaaattctactgatatattcatctattttctactgtaatcagaatggcaggtgccatgatttaggatttttttggtttcgccatttaaataaaagtataaaacacttaaataatacaaataatagtgggaaagggacacaattccttctctatatgcttgagcatagaataataaacccagcaaatgtctagcattttagaatttacagggtacctttaaatgtatcatctcatttaactctcacaaaactttatggggatggtattattaatcctattatgtcaataaagtgactgaaattcagagaagttaaatgacttgcttaagggtcttttagctaactgatagacttgagatgaaaactatggtgttatgagaccaaagactgtgcaacaccacacatcctgtcttaaaatacagatagtcctcattgcacatacagtctttctctgtattacacacaatgtgccactttgcttatgattatctgggtatactgaatttgaaattgaacatgcgttccttgaaagcagggatcttgcgttatattttgtggttcaccctcagagttcaaaataaatatttgttgaatgagtcagcacagtatttctcttctagtcttcttccttaacctatgtccatggcaattacacaaaatagagcatgtttctgtcttcctgcatcaccccaggtggtagcttattgagctgtttactaaaagacaaaagcaggttctagttgccagataattttttggtgattaagtaggaagcttgctgactttagacctattattatttttttcttttagcaaaagtagttttaccttaatgatcttgtcctaaatagattgaaataatatattttgatgtaagtaatgtatatagtaaataatgaaataatatttgaattctaaaagcctgattttgaagaactagcaaatttacctttgcttgtagtcctagtacagagaaagcttttttctgctctttaatactattttatctgctattcaatgctatattgtaaaataatatgtttttagtgctatttctggatctcttaattttaggctgtttctgttggctagctattatggaggctgatgttttcttcttcttgacaccatcatatccatttctttggacaagatcttcctattatggttttacaaatgttggtgaatttgttaaatcaggatttttattatgttaatattatttactgctgaggcaataagtgtacggtgtttatatttcctttcacatcaaacttttctctgtagaattaataattatctctctttctcttttatcatttgcctaattatacaggtgtccaatataatgcctcaccaattattgcctagcattatgtttttctctttcttgatttgttatctcattttaatgaagtacatcttccactgtctttcttaagaaggtatatggaggacagtattatgagatcttgctaagattcagattctgatttaatagagctgggtggcaccttagaatctgtatttctaactagttcctactccacttgctccactttggccattggggttaccaacgttgttggtttgtggaccactcttcgggtagcaagttctagactgatcttattttcttatatattctctcttttctcatatctttgacttaaaaaaatgctttctgggggatttctatgttataatcactttattttcttcaattatctttaaaaaatcaagatatctttcttgtttgatcatttctttattatattgtatctacattttaatagacacaataatgtctcatctctctgaatatacaagtatggcttttttggtatttttttctccagtttattttttagaatctctgtttctgttagattttctcaattttctcaattctctgatcacatttgcatatctactcatatgcaagtggtgctctaacaagcggattgttattttgtaggtgaggagtgggggcaggcttgttgactagtgagattcactttaaggtaatcaggtgagccagcttttccaccaggggatcctcaagtatctctatgaagctattattcctggggactgttcagcctctccaaatgagaatcccagtgttctgtcatgaggttgcaggtagggttggtggtgtaacacttggtgactggcattctgtgagcagggtgggaaggggccgtggggcacatggctcatttgctttcatgtccttatctataaacccagctcctctctcctgttctcctctcaggcttactctttatccagaatattgcatcttgctcctctaggggattaggagggaggtagatcccttagctgctttgaatgattgaggggatcaggtatggggcaaatttccatctatctatagacaaattcaaacctatgcctcctgcatttggacctgcatctgaaccccaccttccatatcagtatgtgctatgcctcttacagtttagtgggggtgaattgctcccttctgtctggtattcctttttataggcattttagttgtgatttttctcagctctgtgaagtcagttatcatctttcacctgcttctgtcttctaaaaatttgttaaaatatttcatttactattgtctccccttatttgggtttatctgtttaaaatatcctttactatactttggtggggatttggaaaggcagtcttaactgtttcctacatgctaacgatgatcaatctttcctggtcttcaaggtccaagacctagtctaaacttctcttagcctgattagtcaaaactacctcaatctttggaaacagcagggaaggatctgtgactcttttgtacccaatggtcataggaggaactttcagaataaatcttttccatgggactcctctgtgagccaccagagttttccgtgtgagtggtgcttttctattggctggcacatggaggaaatccatttgtaccaactccggggcagcttagtgctttcaccttgtagactgtctcaagtcctgggttggagactggccgtgtcattatttaagatgatggagaattaaggacagttgagttttctatattcctgctgtttttcctaaactcttattttagtagttgtcacaatactctacatcaagggttatttagcaggaaggtaaccctccccttcatattttcttgacttctatattgagtctcctttctgggattcagatgtggatttggcaatggtggttcactccactttggcagtttactagaattcacaaattcatgactcaacaggagactaattgagatatgcatgttttggagagatgtttctgaggtcctgggacaagggccttatatttagatgattcaaaagtcttaataaagttgaccaacacacttggggttatatgtctccaaccagcaaaactttctccagagtcaaattaaaacagtgtagtcagaaaaaaattgggcttcgggctttagtatttcttacaacatctcattcaaattgcccttattctttccacctggaaagttatatcttaaatatccagtaaagaaatgggggaaactcctcccactttggtgtgacattgagattattatatcacgggaattttttggaaacttatgtagatgatatgaatattttggtatagtgaataaaataaggctgagaagcaaccttcatttgctttttcctattgggaactgcattttctttctagttatgtaattatctttctgttcttcatttacttagttaaactttgtaacctttagaaacaaatgtataaggaaaagtagggaaatgcttatatatctagtatatgagaataatgatgggtttcatctaagcatgtttaaaaattaattgagcagtattccattaaatattaaaatctctcaaatcttatttaaaaatttatatcatttgaacctatagcatttcataaagcacagcatcttctgaacattatgaagaagtagaatgctcaaattatgaggcttaattagcacccctcagaggattacaaggtgatgaccaggatacatagtcacctttttttttctcagattggccacatataacaggtatatgtgccttatttattcattcagctaatgattattgaatatctgccatggatactgaactagattctggggatgcaaagataattaaactggaatttgccctgaggagtgtacagtctagccaaggagaaaaacataccctaataattaaacattaagaatgatcactggaggctgggcatggtggctcatgcctataatccctgtgttttgggaggccaaggagggaggattgcttgaggccagaagttcaagaccagcttgggcaacatagtgagaccgcatctctaaaaaaaaaaaaatttagctaagcatggcggcatgagctatttgggaggctggggcaggaggattgcttgatcccaggagtctgaggttacagtgagctatgatcacaccactgcactccagcctgggtaacggagtgaaacctatccctaaaaacaagcaagcaaacaaaaaaatcactgggaaacttagagtgtatttgagaaaacaggctagaagccacctgagaaagttggagatgactattccaggaggcgatgctgaattggatctgaaaggacttcacaagacactggggagaaggataaaaggtctctgtactgcacagtacaaataacatgtgcaaagaaaaataactgtggaatgtcctgacacatttaaaaaagagtgacaggttaatatagctgaggtaaagggtgtgtgtatgtgaaattgaaggaagtaaacaggaacaagaattatgggacagaaagtggagggccaactatgtcatcaaaagaaatttggactccatttatgtaggctgtccatgcattaggtagctaatgatcttgctaaacaggaatctacatggccagacttggttttagacagattcatttggcagcagtcagatggtcattccagttgttcagataatatgtgagagtctgaactaagaagtgatggagagaaagatacaaacaatatttaagaaggtgaattattaggagttggaaaccaaatgtgggacaaagggaagtggcagatgtgacatttcttatgctatttccttgcctcatttctgatttcagctgcagctgtggtaggtagatggtttctgtgcacactgcaagtgcagggaacacccaactcctgtcctgcttccagcaactcttagccactgggaaataagaatctgtaaaaaggctgcagcctctcaccctttagtgggaacatctggaagcttattccacatagttccttataaagtcctatgtggaggtgcacttcagtcacccacaataggaatccactcaatcacgccccctttattggttctttctctttccctgcctcatgctccttgctttcccatgcctgcttcctaggtttgctttccaagtaagctctttgtactcattttctggcctcaggttctacttttggaaggacctaccaaagttggaggattaaaggataactctagaatgcatggctggactaataggatgggcaggctctgcctaacaaatattggaggaagaacaaagtaggggaagagtaggaggtggcagttgaattttgttcagaacacattgaatttgaggtgtctttggaatatttagctgaagcacaatgatgaggagaagtggggactttgtgagtcatcaccataaaggttgaggaagagaatgaaatcaagcaagggaagcaatggcctaagggagaggatacaaaataagaagagaggtggatagaaccttggggaataccaacattttagaggtgggcaaaggcaaaaattgtgtcatgatcatgataattttgctagccctaaggagtacctggttatatagtaatgctcagtaaatatttgttcaatgactgaaccagaaaagggaactgaatagagtggacagaaggctggagaaccaggaaaacaaaggctgtatggaagagagagtgtacaaatgagagtttcaagtgtcacaacaggttcatctgggacattggctgaatctggtcacagggctgctttgctagcctcagtgagggatgcaacgaaggcaggcacaaccagcagagggtaaggacctgaggaatcaaagcatcttgaggaagtgaagatggagatttcaaccatttttttttaaatgatgttttcaacactaatctaagctggtagaataaatttggaaaatatagaggaatataaagtagaaaattatgatcacttaagattctttcatccctcctccattgcctccagataaacactggtaacccattgtggtattaggttaacagtacgagagatttgggggtgaaagccagttaaatattggcaattttctacctaaggttcaaagtatagttctttgcagatagatgactactctcaagaggaggaagagcatgtaggatggcttgtggggtttgcagaatctaggcaaaggtttaaagttttaaatttaacttgtgagctaatttttttttttagggtgagggcatcttaacatatttttgtaagccaagaagtggaaggaaggttggtgacagctgatgacaattgctcacaggggttgaaaaatgcgaacactgttttgcagtccattgatctgggtgtgtgcttttttccagtcgtgctggggactggggaagctgctgggtggggattgcagtgtggctgctcctggaaaaacagattcttgctgtggtcgcagggatgtagtgagctttccttttctgggccttgccctgtacttgaacccaaacagcttggacagaaaacattctgaggctcttatcagggaaggaatcacatctgtaaacaggctgtttgaagcaatttgagcctcaacttcaaggtaggaagcaagatgccttttgtttatttttggagtggaattttgtgacccaatctgcagatagtttgctcccccatctggaatatcattggagagtcaagaaaccagaagtggagtcagcctccagatgtctatagggagtctcccaggcctagacatttaagctcagtcactgtagatttcctgcagcacaaaggaagcagcagaagggtccacagaagaattatagtacttgttttattttttaaaataatgggaagagaattggtgcctatcaagcctcttattatagcaaaaaataaaaaacactgcctaagccatgactagcaagactgaaaaagactgaaatccgctgcatgaatgaaaaataaatgacataaaacccagaacaatgaccatgaaacagaaccagtgtctctccagagaaagcccctatgttctctgcttataaaacgtggactctcctgtccttcagtcatgagctccagctcctttcttctcagaagctggaggctggacgaacagctgagcttcagctctctgctgggtccataggtagagcccccagaagaatcaccccctacagcagagaagaaaatcattatcccaggggttggatgacactggggtccttccttatgaccattgctaatgctgcataatggatttcttctaatcaggtcctttggaaactgcatttaattaagacattttggtagaaagttgcccatgcattctgtttgcaagtaaatagaggatttgggttaaggagtctccattgtttattttgaatcaagatcaagccaagctgctttaaaatgtcttcagcttcaggcattggttacttctccccttctctctctggttctgtgcctttacctgagatgttcctaatactaccactaactaatatggacccagccttactgtgtcccaggcattgggttaattgcttcacacacctgattgcattttttcttcagcaatgttgtaggtctgtttattattgctgattcatctatgaagataccatggttcaaagaggataactaacttgcccagcattacatggttagggagagacagaagcactttaaacgcaggtaatatgatatcattaccaggaactcttattaaaatgaccactttgtatgtgaacagagggaggaaggggtgcccaagacaggatatctcatagctcccatataacggtacttccttgaaaataaactaagagtttgttactttattgtaggatatgaatgacagacatgtccaacaattctggtatgagtatatccaacattttgctagtaataaaaagggtaggatgcttaaagttggaaagaatgcatggtggtctaactgcctgagatgatcaaataaataaaattggtttctactatctatttctattaaagacttcagaacaaataatggcgtcctcaaaatttgggcttcttttctttttcatattaatctggatacactggaaggaaatgattaacatagtgcccatccttaggaattttatatttccaatcatccattcacccagttttaaagctagtacaaaaacgatgaaaaaaagcaactaatttagactccaaatagaaaatatgactgtctttccttatatttaagaccatttctccccgctgcaacttcctaatcaatatgtatttcaagacagcacaacctgccccagaataaccatatctttaaaaatacaggtttttatttaccctggagtagtggtatgggtagtggactgtgagccagggtatgcacgttctaggtcctgttctgaggtcatcgcccttgtcactttaggtaaactgcttaacctctccagaccttctttacctgccttgattacgttggggctttttcatgtggaacgtctggatgttgaacagatttttggatgacacatacacacacacacacacacacacacacacacacaccctaaagttccgtgcaaaatcttaaatgtagttgtgaggcaagagaatccacagcttttcttagattttcaaaggctacgtgactgtaaagagattgtgaacttttgacttgaatgatctatctctacgtgtccttcctagaccagaaatttttctaattgtagtttgttagcaagctcagctctgctcttaaagtttggcatttggattctttaaagattgtgaccatccctttaaaagttgttttcaaaccatggaaacaggtgtgaaccacccttgggtgagctgccactaaaccttcacttcttgtactttcctgggtcctgatgaatgaatcgtttgacttgagcatccaaggctcagcccaggaagctactttgagggacataacctatttgtttgtggtgaggtgtccattcctggtctgtaaagaggcatttttggaaggaagcaagacacaaaggcaatcttaagtaatgtctttttgacaaaaatgtcaaaaagaatggccaacaaatataaaaaccaactagccagattctgagggggaattctagtacgctaggcagggagattgtgtagaaagaaaagagcaacaggtttgagaatttgtggggttgtcctcaggcactaggagtaaactaccattattctactggtgggagttccctgataaaagaaacatatctttaatgaaaagttggtaatccttttgtgaataatactgcatacatgatactaattaaagtccttcaacatgtgaacagacactgtttctgaggctgtcacacacatgcagggaaaaggatttaccttacaaaacaatgttgctttgataataccacatctgcaaccctaattgtgcctttgtagcaagttggtttggccattggtcatcctccacagcactgcaatttatcctccaggaacacataggattttattttatggtaaatttgttattattgaaatataagatacacacagaaaagagtacaaatcctaagtgtacaccttcataaatttctacaaagtgaccactcccatgaaaacaataccaagatcaagataaaaagcattgcctaggtccctgttagcctctctcctgccctaccctagccattgcttcaaggaaaggtgactgatattctgccacttatccacatagattcattttgccttattctgaacctcatataagtgaaaccgtataataatactgttttgtgtttggtttcctatcctgtttgtgagtttcatctatgatgttgtatgtatcaatagtacatcctttgtcattgctgcatagtattctaatacagcacagttattcattctactgctgatgaatatttgggttgtttctagtttggggctattatgaataaagtttctgccagcattcttgcacatatattttgttatactcatttctgttgagtataaacataggagtggaatttctgggtcatagagtatgtatatatttacctttagtgaaaaagaaaagaatttttcagagtggctgttctaatttacaattcctcccgcagtgtataaggcttcctattgctccacatcctcattaacactgagtacctttagtgacactggtgggtatgcaataatatcttactgtggctttaatttgcaattctctgatttcaagtgatgcttagcaaatctttgtataaatattggtcgtttggatattctcttttataaatatctgttcaagtctacttttcatttttagaaattgtattatcttttactagttgacttggagttctttatatattatagagtagtcctttctcatatatatattgaaaatgtccgtttctagttagtgtcttccctttacctgtcttaatgtttatcttttggtgacacgtttttaattttaatgaagtctgatttatcaatcttttactttgtggtttgagctttttgtgcccaccccaagaaaataaatgtttttctgttagcttcaagagattttactgttttatctttcacatttaggcctataatctacatctatatctatatctcctatatctatatctagtctgtatctatctatgtcctccaactttattcttctcaggatttcttttaggatttttggtcttttacattttcttctccattttagaatcagcatgccaaattccacaaaaaagctgctaagaactgtaattgaacttgcactgactatacatcgtttggagagaatttatatcttactgtattgtgttttccaatccatgaaccaggtctatctcactttttattttgtattatttaatttcactcagtaatatttgtagttccctgaatatttgtaatatctaagtctgtgacttattagtgtctaatataaattatgtactgatataaattacatataatatgaattcatattttaccacttccctgatcatttaccactgtcatgttttatattattctcttttttaatatcatgtttattgaagtatactttaagccaggtgcagtggctcacgcctgtaatcccagcactttgggagaccgaggcaggtggatcacttgaggccaggagttgaagactagcctgaccaacatggagaaaccttatttgcactaaaaatataaaaaattagctgggcatggtggtgggcacctgtaatcccagctactagggaggttgagggaggagaattcctggaacccaggaggcagaggttgcagtgagccaagattgtgccactgcactccagcccgggggatggagtgagactctgtctcaaaaaaaaaaaaatggaaatatattttacatgcagtaaaatttgctgtttttaggtacatagttgtgtaagtttgacaaacatagtcatttaaccacccacatcaagatatagaatattgccatcaccctaaatacctcaggtgttttccgtgtcctcttatgatcaacattctttctcatcccagcctggcaacctctgatataatttttaagttttgctttttccagattgtcacctaggcagaatcgaacagttacagaagttacacagtaaaatatttcttccacatacataatgcagtttttggattcgtgcatgttgttgcatgtctcagtagttcattccttattaggacgcagcaggattccattgtgtgggtgcatctcattttgtttattcattcgttggttgatagacattgtttaaagtttttgttgattattagtaaagctgctataaactttctgtagagaccttttatagacttttttttttttttttgagatggagtctccctccattgcccaggctagaatgcagtggtacaatcttggctcctgcaacctccgcctcccaggttcaagtgattctcttgcctcagcctcctgtgtagctagaattacaggcgcccgctaccatgcccggctaatttttgcatttttagtagagacagggtttcaccatgttggccaggctggtctcaaactcctgacctcaggagatctgcccaccttggcctcccaaagtgctgggattactggcatgaaccattgtgcccggccagacctatgtttttgtttctcttgcaaaacacatatctgataaaaatgttatatccagaataaagaaagcactgtcaccattcaaaaataagaaaataaacaactcactttaaaatgggcaaatgatttgaacagaaacttcaaagaaaacatatggatggaaataagcatgtacaaataataattttagtcaatgaaaaattgcaaattaaaatcatgctatattagacactgatatatacatttgaatggctaaaattaaaaaataaaaatgacaagtttttatgagaatatgtagcaactggaacattcatacatggtgggaatggaaaatggtacaatttattttcatttattttaataaaattatatagtttgatattcccacccacatatcatgttgaaatgtagtccccaatgttggaggtggggcctggggtgggaggtgtttctgtcatgggggcaaattcctcatgaatggcttgggtcatccccttggtgataagtgagctgtctgtgttcacacaagatctgatcctttaaaagtgtgtggcacctccccattccccttgctcctgcttttgtcaagttaagtgtctgttgccactttgcctcccaccatgagtaaaagctctctgaggcctcctctgaagaagatgctgctatgcttcttgcacaacctgttagaaccatgatccaattaaacttcttttcttatagattaccccagtctctggtattttttatagcaatgcaagaacagcctaatacagataccataatacattattattatttttttacaattcatattcatttgatttacccacacatttacaatttctatggctcctcattccttcccatctttctgtgtttctgtttgggatgattttccttctacttggacaactctctgcagtatttctattagtgcaaggctgctggtgacagattctgtctggttttggttaccttgaagtctatttatttcaccttcactttcatagaatattttctctgtgtgtataaacctagacttatagttattttcttttagcatgtctaataatttattccattgttttctggctttgtttttaagaagtcagtcaaaatctcattgtttgtatggatttccttgccacgggcttctgactttaaaaaagtgtttaattcataccttaattgttcctcatatttattcctataagaagacagaatatgctcaatatgtgttttaagtctacaagagcacatttggtggcttcattctcccatgagtgtctgcccagctttgtagaaacccaatcttccttagtttcacaagatcccttgaaggtagggagtagctgattttctaaatgagaaagatatagagtatagggctttcctgagtccacccaaggtggttgaattgagagtagaaccctgcaatggaacttgcattctcagatgcaaaacctttttctcttctactatataataataatgaaagtcgctattattgccatggattacagaaactactcttccatttttgcacttattggtctaaatggagaacttaacagacctgggtagaatgtgggcaggctgccttcatgaacacacaagaatgcatttgttagtcattaatcctcctggttgatcagagtaaatctcaacccaactgccttatccagggcttctttacttaaaggtgccaggtatacttttgggattaaacttggactcagtttttggtacagtatatacatttgttttccattctcaaaaaaaaaaacctaacttaattcaactctcataattaaaatatcctaactgaattagtaatatcctaagcaaaccaattaaggcgggagggttgcaggcatgtatgtgttaggggagaagggtattgcatgaatgcctgaaggaagtaagtaaatcaaagtttataaagtacagctaataaagtgaaaggcatgatcctttaaaagcattcttataaaaagattatagacattggagagacctgggttggaagtgactcttccaccttcaatgtgtgtgattccagaaagttgtttcacttatttgagtgccagtgcctttgtttcctcatcagagaactgtggatcataatagctacatggagaggaagatgaaggtaaaaaaagttggtagagaaaataaagaagtaaagtaaatatggaggaggaagaagaaagaagagataagaagaaagataaaaactggaagatggaaaggatgagatagcaaaagagttgtcacaattagggaggtgatacgaaaatcactgtacctggcattaagcaggcacctaataaattggtgttgatattactacaattgggattatccttctctatgtagcatagattagaacacaaagttgatctgaattgtgactgcaactttgaggtatttggaccctaaactattctcgaattgttcttgcaaagtcataattacttaaatgttgacatttaaagagattgcttggacttcctgcctaccttaaacacataattctatggctatcataaaaaagacaaaaaataattggtggcaagaatgtgaagaaaagggaactcaagcactattggttggaatgtaaattagtacagtcattatggaaaacagtatggtgcttcctcaaaaaacaaaaaataaaactaccatatgatctaccaatccactattgggtttggtaggtcctcacttcatatcatgaataggttcttggaaattgtgaatttaagtgaaatgatgtacagcaagttctcaaatacattgtttcattcaacatcatttcattacaacattggtgggaaaaaattggtttcattatacatagtttcactcaaattcacagctttcaagaacctattcataacactgaggatttactgtatctattcaaggaaaagaaatcagtatgtgaaagttatatctgcattcccctgtttattgcagcaccattcgcaatagccaagatatggaatcaacttaagtgtacatcagcaggtgagtgaataaagaacatgtggtgtatataaacaaagaaacatcacttagtcgtaaaagaagtgaaatcttgttcttcctggcaacatggatgagcctagagaacattctgttaagtgaaataagccaggcacagaaggataaatacagcatgttctctctcatatgtggaagctaaaaaagttgatctcatagaagcagagagtagagtagtggttattggaggctgggaaggatggggcaggaggataaggagaggttggttaatggattcaaaattacagctagataggaagaataagttcttgtgttccatagcactgttcagtaaatacagttaagaataatttattgtatgttttcagatagctagaagaaagcattctgggtgttcccaacacaaacaaatcataatgtttaaggtgatggatgtgttaattaccctgattttatcattatacattgtatatatgtattgtaatatcacactgtaacccataaatatgtataattattatgtattaaaataataaaatattctaagttagacaccataaataaataaataaaagtatacttatctataagaataagaggattatcatagaaaaccaaagtcaaagtcttcttatattttttacctttaaaaaaatagtttctgaatttttgacattatggaaatcttctagaggttgtttcatcttctgacttaaaaaaattgacctttaacataagatcctttccttgttaatatttttataattctacaatatgagaccatggtataattaagtttaaaaagcccaagtaaataattaggagagtgttgtacttgagttaaagaaaaaatcagtctatcattgagtaaaacacactagagaggaagaaaacaattaataaatgagatgaagtaccgtaggaaaaaattagcttacgatggcttcttgagaagacagtcaaaataagcaattgatgcagtgacagactttacaggaaacattaaaaagcccagatggctcaagtttacatgtttacagataagcttggaaagccagttaaatcttgcaagtgccactcagttaactagaagattttccattctgaggatgagaaaaaagttgaaaagggatgggacaggaaggaagagaagagaaagatgtaggaagagagagtaagatgaaaagatgatgaggctgaagtgatgattgagaagaagtcaaatgagtatagaaaagaaaaagagggaacaagaaggaagagaaaagtggagtatggaaataacaattaaaatcaatgaaagacttgtaaagatgctcaggttttctagtaactgatacccattttacttctttagtgttatattagaagtaaatagtttgggggaaagtggaaaggaactattttagggaagttcagctctgttctattccactgggcaaagaagaacctggttttgttggtaaattgacctctgtttattataaaatagtgacttttatggtgtagttagaatagctttgggattcaccggcaatgtggtttgctacagttctcctacaaaaacggtgacaaatgcagtgacaatgaaaaataagatgtttgtggagaaatacttcagagtattgccacaatgacctctctagccaatggttggggtgaaattatttctcaaagaataaaggaagcaaccataaactctgagcaaaaacaattctgtttacaaacctaataatgacataaatcaatttaatttttggacttaaaagcagggtttcctaacagtggcattattgacattttagactggataattctttgttgtggggatttgttgtcctctgtattataggatgtatagcatctctggcctctacccactacatgccagtagcacccccacttcaggctgtcacaataaaaaatgttttcatacatttccaaatgtcccaagtgggcaaagttttccccaggggagaaccatggctttagaggcattgactaacttcaccaatttgttacatcaaaaaatatgttgactatatttaaataaagatactacacatctatacaccctttattactatttttttttagagataggatcttgctgtattgccgaggctatactcaaactcctgggctcaagaaatcctctcgcctcagccttctgagtagctgggaccacaagtgtgcttgtgcacttgactactcagatctgtgcacccttatttaaggttttttttgaaacacgttcataaattttgttctttcttatcatgcacattctagggagaaaatcaggggagattatattatacctctttccccaaggaaactgagacactgaggaaaagtgaagtccaaattatataggtcctagtttgggttctccaagaatcagactctgggagaagtatctgagtgcaagtttatttaggagttggtcccaggaagcttcagctgaggatgcagaaaaagaaagggaggcaaccattaaacaaatgatacgtaccaaggagttcctcgctacctcaaactgaagtttaaccctgctggagaactttgagggccagtgcaaaacatgtacctcaaagatattctgaggggcaagggagctggattatttgtacactaattctttctggtcactgattaagagctgatcccaggatgaggcagaatcatggctcccccaaaatatccacattctaattcctggaacatgtgaagagcttgccttacatagaaaaagggattttgcagaggtgattaagttttgcaccttgacgttgggagatcgtctgtgattatctgggttggcccaatataatcacgagggtctttataagtgaaagagggaggctggagtgtgagagtcagagaaggagatgtgacagtggcatcagattgtcacatgtaagacaaattcaactatctgttgctggctttgaagatagaaggtggccatgagccaagaaatgtgagaagcctctagaaggtggagaaagaaagaaaacaaattcttccttagagcctccagaaaggaatacagtcttactggcaccttgactttaacccagtgagacccattgcaaacttctgacctccagaattatgtgataatgatgtatttacttaagccactaaatttatggcaacctgttacacagccaatagaaactaatactgattttggtaccagagtggagtgctgctgtaaaaaaatatgtaaaaatggttttgaaattgggcagtgggcaaaggttggaagaattttggctggcaggatagaaaaagcttagatagccttgaacagacttatagtagaaatatggatgttaatgactctgttggtgaggacttgacggatttgaggagcacaatagaaaaaacatatcatctcagaaaatacctaaattttcatgaatagacttttggcagaaatacaaatgttaaaagttttgctggaaaggcttcagatagaaacagggaagcttttttttttcttggaagtgggagggaaggagatccttgttatacagtgacagaaaacttaggtgaattgtgttttacagttatttggaaagcaaaatttataaatgatgaatttggagatttagctgaggagatttctaagaaaagggaagaaggtgcaaactgtttacttcttgttgcttatagtaaaatgtgagagaaaagagatagattgaaagaagaactgtaaaacaaaaaggaagattgtcctggattttgagtgggctcaatgttatcagagtccttataagtaaaagagagggccaggagaatcagtatcagagaaggagatacaatggagtagaagtcagagtggtgtgatatgagaacaactgagtatctttgaaggtagaagggagccatgagccaaagaatgtgggaagcatctaataaggtagaaaatgcaagaaaatgaattattcactggagcctccagaaaggaatgcagccctgttgaccttttggtttgagcccagcaatacccattttggacttctgacctccagaattttgtgtctatgtaaaaatgtatatatatgtaaataaaattatatacacatatatattatacaattaatatatgtattgcactaatgcaagggtaattatttccctaggtcttctgatctgctgtgtgctcatgtagagtgatatgcagattttgtcattgaaaatttggtttggcagactgcaataaaaggggccagagggttatggagacaggttctaatctgtctactaaacaacttgtggtagaaataagtcttgagtctatagtttttgattcccaattcagtgcccattatgttatactgtgacataaatgaagcctccaaatcatgaatctaaaaaaaatgcttatttttttaaaaaatgttttattccttgtccaacggtaaaattttcttctatacctggttgtttattaaagggaatttaatatgaaagtgaattaagaggttggaagaactgaaaggacaaacagcagcagttgagacagcccatagatcagcaacatcaggaagctgctgccaccattaggtctgcagcaacaaagggaggaggtggtgttctcagaacccaaggattggggtcacacaaaaggaaataggacaatgcatatgcactctatacatttctgaaatattgtgttaaataattttccactgatgacccactctgatggagaacagcaatggcacaattcatcaaaacattttaacaatagattaatttgggattaataaattagttagtggagcacctccttggtacttgtttttcgagataaagcagcaaatgaaagagatgaggtccttgacctttttgaggaaagtacaaaagcctgagatgggaatgtacctggaagattcaagaaaaatcaagaggtctgttgctttctgagctgggacacatgaaaggagaagatattagaaaggctttaggaacctcccatttctctatccaaagcatccagaatgattctgtaaatggggaacatctcaagagatgaatgaaagagggcagagaagtaaaatcatgggtgcatttctttttttttctctcagttgcatcttgactgtctcagttaagacactgagcatctttgcattcctggaagtctttgtcagcattctatgtagctactccatttcttttgagcttgtgggctgcaaagaatctaagataacacctgaggttggttctcttccaatattccagtattccaatactcaattctcactttagttacactcccataaaggcagatagatcttggagaaagacatcttcagttaggcttgtttcctttaacatctcagcaggaaacagacaccacacttaaatggcatattgaggagagtttaatgatggggttctttgtacaaaactacaataggttgaggaaaaccaacagaatggcagagcatctggggctactaacatcagggtgtgttaccactcctagacctaaaggggtaaagggatggagacgttgtcaaaacaggaaggctctctagttgtggttgtgtttatgaagaagggatcactcaacaaaagtcacggcttttgacagaggaatgcagccactgcctaccaaagcctaaagggagggagctggaagaaaaataccttgatcccatcgtgccctcttcctccttcacaccatgcttctgcttgttagtgcctcctactggccaagcccagggttcccaatgtagccttctgtagaggtcagtccctgggatgcagagcagagtagaaaagggtgcacaatggatccagaggggcaaagtaatatatggataatagttctcttgaagaagattaactttatattaacaatgattcctccaacaatcaaaatcatcttgaatttgtgatccttcagaaagaacccagaattaagctaaactttgctctgttaaaacagaaaaagatttgctatgtaattgtacagcataaataaaattgctttgggtgggattgtatcactaaatctttatataaagatatgaaagcactttgaaggattttacctgcaagtaattgctttggtagttaaataaccattatcctttttttttttttaaagcaaatatactcccaaagacctgtcaatccttatttaccttctcagaaatgaatgtaccagaaatcttgctttaaaaaatattctttgaatgcactttccctgtccatttggtttccccaaacccaatctgactgagccgggattttctgtagtcacatgtttacctgtggtgtgtccattagggacatgacaacagccattatgtaagtaaaccatagagggtctgatttctcacttgatcttgtatattatttctctttctttgtgttagctcttctgcacctgtgtttgagttaactcttggctctgaggacatttaggggatgattagaatatttaaaaccagcgagtaaacagatctcataattagttgattgcctgtgtagacaaacagaagagattgttgtattgttacaggatctcaaagcaagcatcccttttgggaacttaataaacttcccccttttcaggcctgccctggtcatttggcgtcagagaccacgaggtcatgcccatgacaaaaagcttcctgcagaacctttgttggaagtattttgttttgaatgggcaagtattaagctggcagacttagtcattgggaacaaacttgaggaatagattgggcaggattgagaaggtggcattttattttaattttctttggggatgtggggcctactgctcccaccagccaggacaatgaggaaggggaaggacaagaagaggcaaagtaaatagagaagatcagagagacagccagaaattctaatacagatggagttgatggaagcaacatttgtgtttattccctgacatttatcatcatctggaataacttttttagtgctccaatggttgctgaacttccatatagcattatacaacaacttgcattgtaattgcttaatttcctatcttccccttctagataaatgcttccaatagaactttctgtgacagtggaaattttctgcatttgcaatgtggctattgagtacttgaaatgtggctagtgcaattaaagactaaaattttaattttacatttaaatagccacatgtggctagttgctaccatattggaccccagagcgctagactataagctttgcgaacctagggaccacatgggccatcatcgcgtgcctaaataatagtaggcaatcaagggatattcgctatatttaggaacaaaggaaggaaaagagagagggagagagaaaaggggatggaatctcacatgtggatgaatgtacaggtagaaatttggaaggatggggaacagtgggactgtgtacttcttgtgtttgggaagatatttctacgctataagaatcgcttaaaagcactaactcagatagttgagattttgaaagactaaacctcagtttaaagatttaacttgctttcttctctccattctattttctttgagctttcagaccctgatacagctgaatgctttttaagcattatagtgcagaactctacatggatgttagaagtcttcccagcaatttggtggtttatacagggcatcccatgtgaaggagaatcacctgggatgtggtggcgcctctgtccctcgtaaactgaatgacattaacacttaatctccttgcatgtcgttctacttttgtaagactgtggggttaaatgagctagtttctatgttccctcctggttctgacattgtaaatatgtatcagggtacttgttaacctttaaaaaagtagaaccatttaactttatttataaaatacatgtatttagctgcctactcaccagtatgggggattttccatcacactgatgcagctttcagttggatattacttacagacaaactggggacaatgcaattacttgaaaagagaatttatgatgaccaaaactttgcagtagcattttttttttttaaacagcagctaaaactattttagaagcattggcttgactgtgtaaacaaacactgactcatttaagtaattgtaactactgaattcaatatttacaatgctaaatttaaagacattcattagtaatgtgtagccttaaaagaagtatgagtcatttactttatctcttaaaagacaaaacttctcctattaaaagataagaaaacatgcaaatcaaattttatagttaaactcatacattcttaaaatgtaaaagtaatatatgcacagtaaacaatatttggacatgaaaggaaataggagaaagattcgccaacagctttggtgcttcactgatatcactacgtttaatattttggttttttttttgtgcatgtttctttttatatattataattttaattatacatatatgtaacatgtatatgttgcttaaattataaattatgaaatgtttcagacctctagaacaatatagaaaataatataggccacatcatatgcttattacctagatttcagaggtaagtttggacatgttcgtgtcagatctctttcttgtttcagatctttttatttttaaataataaaatactgtggatactgcgccacattcatcctattcctttcttctcttccctcctgaaattggtctccattctcattcattcttttctagttttcttacaaatatatgaatccacaaataatttataatattatcttacatgtttcaaatgtgcatagatgttattatatacaacacatggttttctttcattataaagtttttgatatttatctgtgttggtacatatacatctagttcatccattttagctgctatatgacattccatttatgaataacccacaatgacttaacctctttgtctgtgatatgtaagttgtttccataatttttactatagtgaaaattttgtaagaaacatcctttacaaatttctttgtgaatacatgtgaggaatttttttttagggtataaacccagattgatagattgactggtagaacatcttcaaatgtgctaggtattgtcaaattgctctttcaagtaattgaactaatttgcaccccatgtcagttgtgtaaaagtctcattttaccttatttttaccaacaattggtactttcagacttttggctttcaaagttggttactttgatgagtataaagtcatattttaccattgttttcatttgtattttgttatttcactgatttctgctgaggctgaaaaatcttcatatttgtattggtcatttggatttctccttctgtgagcttccctggaatccttcacctttggttgtttcttttccttactgatttgaagaagcagtctttggaccaatttattacaattttgtgaaatgagtacttaacaaaaagtatatttatttactcatgtgagcttcattcgtgtttaacaaccatttataaacaaatatgataaaaatttatcaaaagtttaagattttaaggtgactcaaaggtcatatttcatgggtatgaaatctaaactgtgaaaagtaactttcaaaaagcatttttttttgaagaatgtagagaagactacacatagctgttacagtgttggaaacaattctataggagattgcaaaagaccagctgatgtcatcattttaccctcctggaacatctatttgttacaccctgaaaccgaactgatccttcagaaaacattttccctgtattttttttcttcagctgaggtcctctttgggcccaaagactacaaaatctaatttctagagaagtatagagggtggtctagacttcttgcataaaaaactaaatcatcttatgtattagacagtttacaaaggcatagatatttgtgattaaagtcctttttacttgaaaatcatagctcatctacctgtggttgtttgcctgtcctctttgctgtccctcctcccatttggttcatgcttccttttccccttggcagcccacagtaaacaccctcctggttacttccagggaggcagagtgaagtgatggaagtagtgttaggttgaggcaaagactcctggtgttcttggaatcatttaggcttggaataaattctcatgcgctctgtaactttctatctagatgggcttgtaactgacctccaaagttctgtttcttcatccataaaatgagaattatcataacttgttgtaagcctagtgatgtcacagagggtgcctcattaaattagggttcctagggcaatcagtaaggaataggaaaaagagtgggcgggatttaagtggtggcagacacagaggcaagaggccagtgggagacttggaaattgaaagggatatgaaataggcaagcaacccagaggaaatccatggtggaaaatgagaccaatgacttgcagaggccaaaagcctcttctacctgtgcagttcttaaggcagacttgtatttctgagggaggtgttggtattttacagctcaaataccaccaagggtaatatagtggtttgcttgaaggagttaaaatcttactaacgggggaaaaaaaacgcttttctggaactggccattccatcataatggtgggtgactgagatcttgtgatgcagaaagatttcaactgtttccaccacgttcaaagagggcattgttcatagcatttgagtattccaagcagttcagggtttaataccttcaggcataaacacctctttaaaaaatttacccattatatatggaaatcattctaaaatatatgttttattactttgtctttttaagcaaaacctacttatgcttatgtaatttaatcttttcttcctgcatcaagagaatcattataccttttagtttttatgtcgtgtcataatagtgatgctctcgggatctattaacaaataaacgtctgtttgagctagtctgtttgaatcccacgtatgcctttaaagttttattctgttttctctcttgcttttatttgtcttctgatgtactgtcaaacaagtcacaaatatttataaagtaaaagtaactagcctctgaataaaggcccatagagctctccttatagttcaaacaacttcactccaaacgtgttgagtgcctaatatgtgacaggcactatgctaagtgctcaggatataaagatgaataaaacctccatccccaagggctgcacatgctgatgaattataaacttccctgtggataataggcctataatttcttctgtaaactttgagacacctgttttcattttttgccaagtgctctttctcaattcctgattctcagctgtatttgtgctacttgaagttgatgaatatttaaacttccaagagttgagaaattccttttgcacgttaaatggtgttgcatgataagaatgagcagagataatactgagaggaatcagtggccatatagagattcgaaagactctacaaggctttcaactggcatggtgtttaaatgtctgacttttgtgatagaggtttttggagaaaatggttttgtgaaactcaactttacctttaactctacctttttttttttcaaacaaagatataatagacaataatttttaactatttaaaagatgtgggtatactgagagatagaaagagagcagggaatcagtggtaaggtgggcctgactgaagctataggcccactgttctctcgatctggaaataagcatggatagtcaggagtctggttctggagggtgagtggttatagcaccaacttatgtttggggactgagttagcctccttacataaaattgcggtggcattggcattcctctgtcatgaaaaaggctcagaagagacaggatcaatgcttaaagctcagggttggagagagagccttgcaaccagggctggactaagccttttgctggttcagaaaatgtattgttttgtgggataagagccttcagctgccaatagaaggcttagttctagatgtaccagtccttcttacagaagacgggagggaggcaacttaaaaaccattagccagagagaaggaagcaagcatcctctaagaacaccaagtcttgttagtttggctggggcttttccacttttaccatggggagttctacgctccaggaacactgttagtcctgagcaaatcgggatgaccggtaatcctaacctcccccaaccttcaaaataaatctgaaaactaaaacgctgaagcacacaagagtaaccagtgccaagacagacacagccacagcaatcataactcagattaactcctgataagatgaaaattgacttcataataaacaagtttaaggaaagtaacaaaagttataaaacaaaggcagtcagctgtgtattaaggcggataagtatagaaaaatattttagaaatcctggatatgaaataaacacacagtcattgaaatttaaaaatattctagctggttattcacagtaaaagtaggatttgtgaattgaatgatgttactgaggaattcacccataatgctgcttagactgggtaaagagaataaaatcttggaagagaaattagggtaatgaacaataaactgaaagacccctaaatatatataattttttgtaaggagagaaaagaggaatggttaaaaaaaacattaaaatgaattattactgatgctttcaataatgccagaaagacatgagttttcagattgaaagtgcataccaagtattgagaaaattacatcaagtacattcagaaagattaattgaagttgctgagcatcaaggatatgtggaacacttgaaaagttgccaaagaggaaaaaaaaagacggattacctacaatggaatgacaattaggctgatggctgacatctcagcttcaaaactagatgcttaacaacaaaggaatagtattgtcaaaatgcaaagaaaaagaaactagaattccatattgagctaaactgtcatttaaaagtgagtatgaaatgagaacattttcagatgtgcaaaaacccaacagagtttgccaagaacattccctcattaaagttactccctaggaattcggtaccagctaaactaccatttgaaagtgagcatcaaatgtgcaaaaaccaagaaagtgtaccagtcacacccttcaatgaagataccatctaagaagatgaccttttaaagaagcaactgtgaataagcaaattcataaattgtattggtaaatgttatttttagaagtttttgtttatggcttttttttttttttttttgagatggagtcttgctcttgtcgctcaggctggagtacagtggcgcgatcttgactcactgcaacctctgcctcctgggttcaagcaattctcctgcctcagcctcctgagtagctgggatcacaggtgcccaccagcacgcccagctaatttttgtatttttagtagagatggggttttaccatgttgagcaggctgttcttgaactcctgacctcagatgatcctcctcccttggcctcccaaagtgctgggattacaggcttgagccaccacgtccagccgtattggtaaatattattaatattttttaaaggtggaactaaaattctggataaaaatgacaaggagagggcacggagggttacagagaagggctccacaggtgattgcacctatggattctacctattgcacaggctattgcacctatgtcaacaattgtaatattgttgacatctcaaatatttacttgttttgcattcagaaaagacctttgaaaaatgcttgactgtcttcactttcttttaagcaagggagatttgagagaagacaaatcttttatcagattatttccagtcaggctgggagaggaaagtggaaaaagggtaagaaatggcaagtatgaaagattttgggccaggtgcagtggctcacatccataatcccagcacttggaaggtcaaggcaggtggatcacctgaggtcaggagttcgagaccagcctggccaacagggcgaaaccctctctctaataaaaatacaaaaattagctgggcgtggtggcacgtgcctgtagtcccagctacatggaaggctgaggcaggaggatcacttgaacccaggaggcagaggttgcagtgagatcacgcaccactacactccagcctgggtgacagagcaagactctgtctcaaaaaaaaaaaaaaaaagagagaaaagacaagaaagattttggacaacctctaaacttgtctaggtcttcatgatctggtgtcagggttctatttgacatagaattcctgaaaagcttggcacacacatattaaaatgttagaacatatttgaatatcaaatttaaataattgttgcttatttattacttggggttattcaaattttgttttttttttaaatataaatgcttgagaattgacagtagtgttttttctccaaaggacttaagaatgaaaagtttagaagtatgtcaacattgtgacagaaggcattaattgatgcccaagcatgaccctaacatgatttcatatgttttgatgtcatctctttctttaagctgcacagtatgttaaagtaaaagcttctgtttgaattgagtgaacacagagcttcagtttttcttttttaccatatatgtatagttgaatactgatatagtctctcattcatttttgtactgtttctcaatatctgattgccaaaagaaagagatttcttataaaataggcttcagaccacagggcttggattttaagattacatttttttaaatgaggagagagtggtagttctgtgaataaagtagcaagaataaaaaggaagagaccaaagatgacattttgaaggaagtaattgccttggcatggcggttttgagcccacattgttaagtggtttctggcatgatatgtgattttcctatgtgatatcctgaatgtttaccagaaaaattaaagacacatgctaagaagtcaaggcaaacctgtgagaatgaagcagactttttcatttgctcattcattaaatgtggatttatgtgcacacacaggcactcatatatgtatacataatacgtacacttataatgtgtatatatactccttaaatatatgtatgtacacatgtgtatatatctatgtgtgtatatatatacacacacacacacccctctttctctctctcctctcttttcctctcccccctcccttcctctctcccctcttttttctccaccgccatctccagtctttcccccttctctctctctcctctttcctccctttctccctctctccctgactcgctcccttcctcctcctctcccactcccttctttttctctctgcctcttcttccacttttcctctccccttctctttcttcttctctctcttgtctccctttctctttccctctgtctctctctccccatcctccctctctctccctccccttctccctctctctctttctctctgtctctgtagtattatgttgtcctaaattctgtgaggtgctaaaggaagtaatacaacatatctactcttaagagcttattttatgtcaggaaagaaaagggtatgttaacatattgctatgtaagcaaaaaaaacccatttattataatactaatatttatgatgatgataatataagggatgacaggaagagtatatgattcagacccaaaagaacaatataaataagcacattttcaaaagttattaaaaagaagaggcaatgagagttagagacatttgaggaagttgtagaggaagaaaaggaacaatcagtgggggaagtggtgagaccaaatgtgctgaggctgaaatggccttggtgtgcttgggagacagtgagtacgtgaatctgcctgcagaagttgggagtggggggaatattattaggattattaggaaggtaagctgagaacataatgtcaagagtcttaaatgctggctaataagtatcttagaaagttacttgagcaggaaagtgatgcaataaggtcctatttaattgacagctgattatagaatggactggcaggggagtgtctagaagtaatatcaattgtaaatcatccaaacaagagcttaaaagagcctggcctgtaggtgtcatggcatatatgaaaaaaaagagacacacagagagaagtaaggagacaatagttgacagttctgagttaaggccaagttggtgcaaaagtaatcgtggttttggactgtgaattttaaatcactataaccagactcaaacacatctttattaatcaaaataggaaccattacaatcaacatatttttgccaatgataaatacgtttgtttattcctatagcataaaaatctgtgctttgggatttgatgaacacttggaaagcattttctgcattttgctggttgtggacgcgttttccctgcaaaaagttgctgagatgcttgaagaactggtagttggttggcaaaaggtcaggtgaatatggtggatgaggcaaaactttgtagcccaattcgttcaacttttgaagcatttgttgtgcaatgtgcagtcgggcattgttgtgaagaactgagcccttcctgttgatcaatgccagctgcaggccttgcagttttcgttgcatctcattaatttgctgagcataacttctcagatgtagtggtttcaccaggattcagaaagctgtagtgggtcagactggcagcagaccatcaaatagtggccatgacctttttttagtgtgagtttggctttgggaagtgctttggagcttcttctagatccaaccactgagctggttgttgcgggtcgtcctataaaatccacttttcatcacatgttacaattcctactaagaaatggctaatgaggccaggtgcggtggctcacgcctgtaatcccagcactttgggaggccaaggcgggtggatcacctgaggtcaggagttcgagaccagcctggccaacatggtgaaaccctgtctctactaaaaatatgaaaattagccgggcgtggtggtgggcacctgtaatcccagctaatcgggaggctgaggcaggagaatttcttgaaccaaagaagcagagtttgcagtgagccgagagcatgccactgcactccagcctgggcaacagagcgagactctctctcaaaaaaaaaaaaaaaaaaaaagaaatggttcattgttgttgcatagagtgagagaagatgacacttcaaaatgacttttttttattttttattttcgcttagctcatgaggcacccacttatcaagctttttcacctttccaatttgcttcaaatgccgaatgaccacggaatgggtgatgttgagttcttcggcagcttctcatgtagttgtaaaaggatcagctttgattgttgctctcaattggtccttgttaacttctgatggctggccactatgctcctcatcctcaaggctctcttctttgcaaaattttttgaaccaccactgcactatacatttgttagcagttcctgggccaaatgtgttgttggtgttgtgagttgtctcctctgccttacgacccattttgaacttgaataagaaaatcgctcaaatttgctttttgtcttaaacataatttccatagtctaaaataaacataaaataaaaagcaagtaatgtcattatcaaaaaaaatgaagtgagaaatcctcattaaaatgatgtataacataaccacattttttaaagaatgtattcccatatcaaacagcaaatttcaacaacgcaaaaactgtaattacttttgtaccaacctaatataatgggcaaaaaaggagagagaatcatagataactctgtggagtttgcaaacctggctgagctgattttagtaatggcagatgatgagtcagacttagtaaactagaacatcctttttgtcaacattattggaaaatacattttttttaatactttaagttttagggtacatgtgcacaacgtgcaggtttgttacatatatatacctgtgtcatgttggtgtgctgcacccattaacttgtcattgaacattaggtatatctcctaatgctatctctcccccctctccccaccccacaacaggccccagtgtgtgatgttccccttcctgtgtccatggaaatgtaaaattatttggtttaattacaaatacttcttaaggagttgtgtgccaggcaagagtgcttcaaacatgatgaatcagagtctcaaggtttataaacagatttttacaaataagatgttttgggaagcttcacactagtttagaataccttaacagaagagaatttgattatgtatttgaatgattcctccaaagcattccaacagaatgggataactgtccaaaaaaactttctgcaatgatggaaatgttctttatctatgctgtcaaatatgatctccactagtcccatgtggcttttgagcactgcaaatgtgtctagtgcaactgagaaactggattttacatttaacttaaatgcaaatttaaatatcctctcatgaccagtggctacgatattggacagtgcaatgctaaaggatctctaagtcatcatgtttgacaatatgtggttgcccttttagttcagggaagatgtttgctttagcatgtgtgattgaaattcaaatttaacttggcaacaaaaattgccatttgaaaataaattgtccatttactgactcaacaaatatttatttattgtctatcggcttctaaggttaatgtttgctgcagtggtggaaacatggttgtggtccagccctcatgtggctcacaacgagggaaggcattaaaacaaaatcacacacttgcaaattgagatgagcaccatatagcagaataaaactccagtaaaagactataatggtgttcttaagttggagatggtgggaaaaggcagcatttcagcagaaataaggaattagctaggaaagagtaaaggtaggaacatttctagcaaagggcagtcttaacctgtccgaaagcatgttatgtctaaggaactggaagaagggctttagagcatacatgacttatatttatcctagggaaagaaagtagagtctatcttaggttaaaatgtggtatctgtgaactatttcttcaaaatgtgcagctttacacatttctaactatccttagatatactacagcattttattctctcctttctcttgcaaaaacaggaaagttctgagtaatgcactgagtattgttctcaatcttcactacctgtctgttatggaattacgtgctcagtctctatgccatgggacatcgtactatttccccctagaacatctggagtgtatttctccactccagggcttggccctggagtattgttacagggcttggccacatgacttgtttttactaaaggagtgggactcagcatgatgtaagcctagggtaaaaatgtgcttacaatatttggcttgacctcttccacttctttcatcctccatgaagggaacctgtcctgtttatatgctggttaaccatgaggtaaaaacttaaactcagctggcagccaaagctaaatacagtgaatctgagatgagatcagattagcccctgccatcctacagacattaaagtgaaacaaaagaaaggtttgatatgaaccactgagttcattgggttatttgttatgcagcataattacaacagaaagctgactaatacagagagatgttctttatcttcactggttcattggctaattatctaccaaaatacaacagtgcttgaagttttagtttttctttctctttgttaaaagaattttagtcatagaatgaagaacttgaggctgagtgttttttgagggttatttgaagcaatgagtgtctcatactagttttacttaggtggccttggtgattactttgatgtaattattttagagtgacttgtggataatgagggaggcagaatacatgtgacatgtcttccccatcctgcaaatgttattcatttaacaaagtcagcggatacactggggaaatatgaatgatatagctctcctcagataattctcacagcctagcagaggaaatgaacaattaagtaaattattaagataaagcatgagaaatataaaggtgtaagggtgccctgaggatcactcaaaagtcattccttcgagacatttttgcttttcttaaataagtcaatgtaactgaatagtatatcataagtgtttgcaattattttttctaattattttcttcctgaacacagtttagcccctttcttcagctctcagaagcttcagtatcttggtcctcacttccccacccttgtacccacacatgtattttcaagttggctgaaacatttgatgctacttcagtttgtacctaataattttcatccataattccccttaactcaagtctcataatgggattttagggtttctacctctagttattatttctgacaaagaaatgtggaacccatcttcttcatttataaaaacatcactgtgattatattccacggaatggataattctttaatttgatatgacataattgatcaagtgtgtctgtgactctttcacatgaggtttgtaagtctttgctaatttacttttcttgtgtcagctattcatagactattccttaaggtttaggagtttgcacaaaatgttttttttaaaagatcttacataaaccatttataaactttgacataaattctgttgaaatgaaatgaaataaaagcctagtaatatcctactgaattgtaggctaatgatggaagaggaaaagtatgtgaggcaaagtaatttcttaactatttttagtttttgacaagatccccttaggggatctcttttgtcttgttacctacataatttgggtggaacacatagatctggagaagctaggaagaaataccaaaggcttggatcagtgatcagcttcttatatgacaccatctgatttccctgtcttctttaatcatgatgggcccattctttgttggaagcagcataaagttgaatttggcttttatattcagtctgccaatgtctctcttttgactgggagtttagatcatccacactcaaagtgattaccagtatgattgtattaaaatctactatcttcttgtttctatttttccatatgctgttttttagtttcctttttttctttctcttaagttaattaaatcttcttatgatttcattttatgtcctctattgacttgttatttatatctcctgttacctttttttattttgtgattgccctggggttaacaacatacattttaattaatctgagcctgccttcaagcaatattataccacttcatatgcagtatgaagaacactatattcccaattcatctttctcatggagaaatgaagacatgctaatactgccatatgttttacttttacatatgctataaatgtacataaattgtcactatttttgcattagttttctcatatagcaattacaagtaagaaaaaattattttaccttcatttattccatttcaagtgctttttctttctttgtttagagctgttttaactgttattatatcactttctgtaatatttcttgtagagtatttcgataacaatgaattctcttagtttttgtctaagaaagtttttcttccttcttcacttttgaaaggtattttttctgggtttggaattctaatcagacaggatttttgtttcagcactttacagatgccactcctttgtcttcttgcttgcatggtttatgatgagaaatcttatctttattctactgcagacaatgtgtctttttcctctggctgcctttaatattttctctttatatgcgattttcagcagtttgaatatgatttccccagcattgtgtttgtgtataggtgtgtgagtgtatgttggtatttatcttgctagatgttctctgagcttattgagtctgttttttggtgtcttatatcagttttggaaaatactcagggaatagttactcaaaaaattttaaaaaatctaaaatttatggtgacctcagattggcattcctcccaagtatctggtgttagcaaactcaaatattatctggaaaaaggacattttatcaggcccatcagataaatacttcccattatgaagttcctagaagcatgaatttaacaccaaaaatcaccaaatggatgagagaaaaagctaccatcagggaggccagaggatcataaggataagaatgagaacaagggactgtcaaaatgaccaggcaaaatttttcaactgaattcaactgaaatatataataattgaacctgtaaacttaatgaaatgctaaacaatatcatgtattgttgtagaaaaaataaactagaatgtaaaaataaataagtgacacagataaaatgatagaaaatataaaaaagatagaagaaaaggattaaagaatgaaaatatctaatatgcttataaatggatttctagaataataaaacaggaataatggaacaaaggcaatatttgaagagataatgactattttccacaatcgatgtaaggcatgaattatcagtttcacaaagcccagtgaatctcaagtagaataaatagaaggcaacctatagttagacacattattataaaactgcaagaccaaagacaagaaaattattttaaaagcaaccaaggaaaaaggggaaactacttacaaatgccaaaaataaggttacaaactgacttttgacagcaacaatacgaaacagaaaaccatagaatgatatcttcaactttctgagagaaaattactgccaatctaaaactgaatatcctataaacccatctgtgtaggacaaagaaaaaaaatcaacataaaaatgttacttataaatttcaattaaaatttctaaaatatgcctttctggaaaagtaaaaatctcaagtagaagctattttgatgcaaacaactgcatgccaaaaatatggtacatgtttatctaaataaacatttactacataaataaatatctaatttataggttagaaaaataagataaaactaaagtgttgaataagaaatgtgaaaagagaaataagtggcaaataattttaaggcactgttttggtctcatggaaaaatatactgatttactatattatattgaattacattttcttattcagtattttagggcaatccctaaagagaaaaagtaataggggaaaaaatccaatggtgaaaaattaatagtaaagaaggtaagaaaagaaagggggaaatgaaaacataaaagcacaaaataagatagtagtaataaatccaaatacaccaacaattaaataaatggttttagccaattcaaaaataatagtctgaactgggcatgttgtcacatgtctgtagtctcagctattcagaaggctgagatgggagaattgcttgagccaaggcattcacctgggcaacatagcaagacctagtctctctaaaaaaatatgtgtagaaaacagaaaccggcaatatattgcctccgtatgatgtaattacaatttaagagcataggaagtttaaaaaagtggatggaagatgtattaggcaaacactaagcaaaatcaactatgaatatggcaacagaagaaaaataaataagtgttgcaaagattggaaaggaagaaccaaatatatcattgtccatagatgctatgattgtctactggaaaatccaaaagaaacaatagaaaaatgattagaattaataagagcttaacaaagatgctggatgccaaattaatacataaagtaattgacatttctatagattaacagaaaataaaaaataaaattcaaaaggtgacttttaacatagtaattctgtctatgtatgtgagtatatatctctttatccctcaatcattctgtctatctctactatctattctggatgatagatgatatcatataggatagttggaattaaatgtaaattcagtaaggaaccttttgaagaaaagtatacaattttattgaaagacattaaagaaaaaactatgtagagaatatactatgtttgtggaagggaagttttgatattttaaagatatcaagtctccaccaaataatctacagatcctgtactgttctgatgaaaacacagtaagctattttgcagaactttacaagctgtttctaaactttgtatggaagagcaaagggttaagaatagccaggagactcctaaagaatataaataaggtgtgcgtggatgggtgtggtggggtggagtgaggacttaccctttaaaatatcaagatttattgtagaactacttaatttatacacagtggtatgttacaaggataaacaaggagaaaaacatgatgagaatgtggaagaattcatataaagtcctatatataaaacagagctgtcaatggatatcagtgagaatggaatgaattattcactgagacaatcagctatccataaggaaaaagaaaaacaagttgtatccttaacttcacaccatgaaaaattgcttattttgtagcttctactacttctgagaggctttttccttcacagtgaccaatgggacaatgacaaatgtctttacttttattcaagataagaggttttcctagagagtcatagtggaagcacgctaaataaactgaagctactaaagagtagtaagctttttagtagacagcagttggttgtcacataaagggcatttacaaatacaggattcaattccctggtgattgtaatattttggaacgctggtcacttctaagtacatggcctttcctttaaggaaagcttaagtggtaatgttgctggtttaccaagtgaattctggcaagtcttacaagtatatttgtaaactgtaattatattattaaatgtgaagctgtacaattcgctgctttgaaaataatacttaggtaaaaagctatcctctcttcttctactaagtattggctggaattggaggagtgattttttttcttgcctggttggtgaattcaagtgcaagttttgttttgttggaggctgacattttctcagaggaggtaagaaatgtttaatctctgtaaggtacatataagacctcagaagcttctcttgactatgtaacaagccatttatggtgtgggagaaggagacaatttgtcaaagatattggaaacactcaaaggaaggaagaaccaaaacctgaccaagataaatgttggacaaaccctgttttgagttccacctggctgaggtaaggagatttttaataagtggtctagtgaagagtgaaataatgaataggagatgtctagtctttttaggaattaaaaaaagttcattcaaatacagtacacaacacaaatcataaaaattcaattcagtttttaccataagcctaatagacatggtacgcacatatacttctcagctacatgtatttatgatatccttatgcgtcacctctggggatagcctgcaacagaaccatctggggtgttttttattgcatccatattttagtcataattagaaaaacttttgttatcaccaagttataaaagaatttacacattaaaaagattttttaatagtagatccctgatttaatagtagtctattcttatgtatggtgtgagatagggatttggtcttatctattttcaattagtaaacctgttggcccagcaccatttattaaaagttaatctttaacctaattatttaagatgtcattgtcaccatgtactaaagttctgtggttagtttgttctatttttggactattctattccattgtccatgatattgctgtaaaaatgcaccaaaactttcccatataagaaactttataagtaggtatgaaaattagcattttagataaattgcccaggtgattttcatgtccacacagttgttcctttccatcttcttcagaaattttaacaaattttcttattaccttaagaaagtagattgttaaaagatagcaaattgttctaccaaaagacatatgcatttgcctgttcattgcagcactattcataatagcaaagatgtggaatcaatctaggtgcctatcaacagtggattggataaagaaaatatggtacatatacattatggaatactatgcagccataaaaagaatgaaaccatgtcctttgtagcaacatggatgcagctgaaagccattatcctaagtgaattaatgcaggaacagaacactgagtaccacatgttctcacttataagtaggagctaaacattgggtattctcagacataaatacggcaacaatagacactggggactgctagagaagggagggagaaagacaggaaagggggcactggttgaaaaactaactgatggctactatgctcagtacttgggtgatgtgatccttcataccccaaacttacgcctcatgcaatatatctgggtaaaaacaaaccctaaatatgtatcccctaaatgtaaaataaaggggaaaaagaaaaaaaaagaaagtaggtcatcagtaggtacaaaggatagattgtgaccaacaactttgtgtagataaagtggttctcccagcagttgatgttgagatttcattaaggaaagtgcatcatttaaacaaaaatagtctgaggtctgtctggttcaagataatggacaacgtggaaatattctcatctccttctctgaacctattaaaatggcagtgaaatattaaactaataaatttataaagctgaaagtggatggggagcgaggttggaagacacaagcaaaacaaagattccgttaatttctggaagacagaagactacctagtgtctgtatttatctattgctgcataaataattatccaaacttaagtgactaaagaaacaaacacttattatctcacctgatttctgtgggtcaggaatttgagagctgcttagatgggtggctctactcagagcatctcataaagttattgtcaagatgttacctggaaattaaccagggctggaagatctgttttctagaaggctcatttacgtggctggcagattagttctacctattggcaggaagccttagttctccaacagcctggaaaaaagaaacgtagcttgacattgtactctagagtgacaaagttgataaataatgacaactgagagagggagaaggaaagcactatagtagaaataaaaatattgttaaaaatgaatattaataaaaattataataacatctggaaggtgaatggatagacaaaatgccataaatatacaatggcatactattaaatgaaaaggaataaattgtcatatattacgttaaggatgaacctcaaaagcattatatgaaatgaaagcaaccagacaacatcatgatattgtatgatttcatatttatgaaatgttcagaaaaggcaaacagaatggtggctgcttgaggctgcattgggagaaggtattaactgtaaatggtaatgaggcatcctgttggggatataaaatattctaaaactgatttctggtgatggttgcatcatttggtaaatttagtaaaagtcattgaattgtgcatttaaaatggatgaattataaaaatatgtaaaatgtatctcaacagttgtttaaaaataaatgaatgcaaaaagtaactgcaaataatacccttatagtaccattaatcctaatagtgcagataaatataaaataccaagtgctctgaaaagagagaatttgagtgatagtgtgatttatggcattgtttaaaacagacctttaaaatgtactatttatttttcttagttacacataaaatacatgttaattatgaaaattttagaaagtttagatgtgtacaatgaagaacatacaaattaccagtatttgtcatgcccaggataaccatcattaatattaatgtctatattttcaggttttcttttccatttgtaaagcaaaatttaaatgtgcagaaactcttgtaattttgataaagctaattggaagcttttttatgatgtcttgagaaaatcattatggtatgtgattttatgtataaaagtgttaactaacaataagggttgaacctgaactttgaaagaagtattgaataaatataaaaatggctggtttgacaatgtcaaagcaaatttaattggtaaatattagttggataattgaattctcccccactgtgccattgaaatgaaccttagagtctccaatccaaggcaatcatttcacagatggggagaacgaggcccagaaggcttgtgagttttcaaagctctcccaacaatgggatcagagtgagaacacatacctcctcactctctgcctatgttcataaccttgaacttgtggtaggtccggaattgtgggaaaaatgtgaagaccacttgatggaatttcctgctgttcttgcacagggtgccccattgtgaactcctccagcatttacagatgctactacttgtggagagtaaatttagaccttcgcagagatggggtcactttagcttgtggcttatttttgtcttactgtaggttttctctctcagtagaccaggctgtcttctttacctttcttcattgtccttgatttagaatcaatggtcagtaggatcagatgtgggagagctgtttgttaataaagctttagaagtcgtgcaaatgacatcataacttttcttcatgggtgagatatcctgagattgctattagagaaaataacgatacttgtcatatatttcctctaaataaatctggctttaatagcaaaagtccatgttttcttcacttctgtttatttgcagtcactcaaactgacacgtgctgtcaatatctcctcactgtaagtgtaagcagaagtatttaaagaaagcggtattgttttattttggggttagcaattttccagggcccactggaagaagtgcttagttctaaagaatcacatgtgtttgctttgttctaaatataggctaaacagaatgcagtagagcctgaaggcttcagaccaaacatttggaatattaaaaaaaaaaatcaagggaagcaatatctcctgcccagagctaaacaaataagcaggtttctgctaaatgcaggaaacaaactgatggagatcagattttcttctcaaatcttttagtggctttttgaaatgtttcctttaagactgcaaatccagtgtcagcctccaatgctacagtaactcattgctatattggtaaatggtaaccagtgtgtggtcttgctggaccgtggggaagggctgcaatgtaatggatgtgactgctttaaaaaagcagattattaggattttttctttgaactctgccctttagaatatttggtacatgaatctggcataatgccaaagagcttctaatataagtctttttgcctgtggactacatttccaggagaaggggagggacacatgtaacatgtggtattaatattattaagttctgttttacagtgtttctcaaactggaagctatagatccttgtggcctatagacatattgtcatagatatgcaagtactctaatatatatctcaaattttaagaatggtataagaaaaattagcatgaacatactaaaaaaccttatacaaaatcaacgtctgtattagtttgttagtgctgctgtaacaaagtaccacgaattgagtggattgagcaactatttattgtctcacagttgtggaggctagaagtccaagatcaaggtgctggcaaggtcggtgccgtcccagcgctgcaaaggagagcttattccatacctctttcctggcttctggttgtttgctggcaatctttggcattcctttgcttgtggatgccaagggcctctgccatcatcttcatatggcattctctttgggtgcatgtctttctttgtgtctaaatgtccccttgtcatagggacatcagtcatattagattagggcccaccctaatgacctcatcttaacttgattatctgcaaaagtacctttccaaataaggtcacattcatagttactggcagtttggatttcagtatcttcttgagggacgcaattcaacccagaacatctagaaagcactgccagtctgacttcataattgggataaaggaaagtagcactattttagttgtcctgttctcaagagaaaaagaagagatgacttactattcacataatatattggtgccaagacaaggccagacagtgtcatgtcaagataccccataggaaacttatttcatggagatggcaataaaaaacggtggtggtgtgtggtagaacagacataatgagtccaaaggaatctacatcataaaagacatatttataaaatctcttaaagtagcaattcgtatgtatttctacctagaatatgacttatgactgagttttgaatccagataactggcagctaatttggcataattatataagagggaggagcttatgttgttctttttctttttctttttttttttttgagacagagtcttgctctgtcacccaggctggagtgcagtggcgcgatctcggctcactgcaacctccacctcccgggttcaagcgattctcctgcctcagtcttccgagtagctgggactacaggtgcctgccaccactcccggctaattttttttatgctttttttagtagagacggggtttcattgtgttagccaggatggtctcgatctcctgacctcgtgatccgcctgcctcggcctcccaaagtgctgggattacaggcgttagctaccgtgtctggcctacgtttttcttaaagcaaaagttagatgcagagaaaatagttgaatttcacactttaataattgtagtaacaatgatagctgtcattcattaaaggccttctttatgtcaggcattatataaactgctaaccctcctcagcacccatccaagttattataatccctatttgatggaaaatttgataggactggtatttgaatgatttctatctaaactcaagatttgtattctttccattacattttcacatttttctgactttacctaaaattcatgcaaataagatgaacatctctcagtgagcatatcctagaccttggctttgaatatccagagttctttttctctttaaactgtgtgtcatgtctcctaatcagatgaaatcaaaggaccgtgaagtgtataaggtgatgcttgggcccatgaatctagttggaaatgtaaaccagctaggtttacaaatgtctggccagctaggtctgcaggtcttaataggctctgttccctgaggggtagcctcattgagaaactcaagggagcagtggcttaccccaaggagattaagtcacattataattaataaatttaacaaaacaacagtattaatattggcacctcccaccataggagagacatcaagtgcagtctcttgtttctgcccctgaagttagttattgggaaattgtttctagatctttaatggaaagttgtgttttctttcaaagttctccattgtgacactatggttccttggacacaggggtgaacttatataattagggagggccttgagatttatttagctagagttgcctccaggaatactgaagatgagtctaacagaaaagccagtcatttttaaagaagctattttctttgaggattcggcacttactatttattgaactatccagctccctcatacttaattccaatcttgtgccatataatattccaaactttcaggcaggctagatataaatcagaagtgaaattgtagttaaatggtacagccagcttgtttccatttggagatagtccctgactgaaaaatgggcttcacagtgtcatttcaaagattttgtttcattttttgctttgacaagtaagtgcagagatcagaaattgcatatgccatccagtatttcagctgtaccactctcaacctggcgagtacaccaaagctgttttatattgctgttgggggtgtctaggaacaagcatctcaaaggacataatttattataactaaacaattgtcttttcctagcaatgattccagaataggaaatctaagaagaagttttgatcatgtcaaaaattggctcaaataaaagtatcatacaggatatcaataaaatggaatgttgagtttgctttcctttccttttttttcctctctcttcctcccttccttccttctggtttgcttatttattttagaattgaacacaagtgcttattttataataatttggtagtatattaactattttttgatgtaatattttgttgattttgaactttcaaagccaggaaagcaaatatttcttggttttgccttctaaaagttccttctgctggcaggagcgaggtattgtgtagatgagctcaaacatacatttgacatacatggtgggaaacacatttcaactgtttataacctcatgatgtgaaacttgactacctaaacaatgaaaggaaatttgactggagttctaacatactagcatggcttggtgatccctacatattgaagagtttaagtcaagactatgcgagttttcattatgggcattattcatcctagagtccaagtattttccttccagtttcattgatatttctttctgctataatatgtttcccaaattttcatgtaaataactttttatgacctcaattgtgtttttttctaaatagtctgtattattgttttaaatattgtacaatatatacctgttttggcaaattcaaatgagtcataagtacatacattaaaaatactatttttggtcccgttctatcatcactcttgcacaaacccagataacctgttctaatacttcggtttatgccccttggagtattttaaaaatgctccccccttttaaaataaatacctacacacagtgttttttttttttttaatgaaaacatcatattttcctattgtatttttccatcaatttgccttttatactttccatcttttggattttattccaaatcaacatgtatagatttttctctctcttaaccaatagttgaattatccaaattaaaatatatatttttaatttttaatttattttgtatatttcttgtttttagcacaacgctgtgtgtctgtgtgtgtgtgtgtgtacctgtgagcatgcacttctatgtagtttatcctgtcatctcttaagataaggggggaggttgaaatgtatttttggtcttctatactgaaaccaaaaaattgaatctctttttaaaagacatttctagatgcagagcctataggaatggtaacatgaattactctggctttgcgtaagtatcttaaaaaaataaatatatacactttgatagtaggttgactggactatacagtccatgtttacaaactaacttaaatcttaattccaagtgttctggaatataagaaccatgggaagagcattggttttaagttgtttcaagaggc
